(19) United States
(12) Patent Application Publication
(10) Pub. No.: US 2015/0147761 A1
(43) Pub. Date: May 28, 2015

(54) SPECIFIC BIOMARKERS FOR HEPATOCELLULAR CARCINOMA (HCC)

(71) Applicants: Helmut E. Meyer, Recklinghausen (DE); Barbara Sitek, Witten (DE); Dominik A. Megger, Dortmund (DE); Thilo Bracht, Bochum (DE); Hideo Andreas Baba, Essen (DE); Joerg Friedrich Schlaak, Essen (DE); Frank Weber, Essen (DE)

(72) Inventors: Helmut E. Meyer, Recklinghausen (DE); Barbara Sitek, Witten (DE); Dominik A. Megger, Dortmund (DE); Thilo Bracht, Bochum (DE); Hideo Andreas Baba, Essen (DE); Joerg Friedrich Schlaak, Essen (DE); Frank Weber, Essen (DE)

(21) Appl. No.: 14/409,520

(22) PCT Filed: Jun. 20, 2013
(86) PCT No.: PCT/EP2013/062955

§ 371 Date: Dec. 19, 2014

(30) Foreign Application Priority Data
Jun. 20, 2012 (EP) 12172829.9

(51) Int. Cl. G01N 33/574; H01J 49/04; H01J 49/40; G01N 30/72; C07K 14/47; G01N 27/447

(52) U.S. Cl. CPC G01N 33/57438; C07K 14/47; G01N 27/447; H01J 49/40; G01N 30/7233; H01J 49/0418
USPC 435/7.1; 530/350; 436/501; 204/456; 250/282

(57) ABSTRACT

The invention relates to specific marker proteins (biomarkers) for Hepatocellular carcinoma (HCC). The invention relates to a method for the diagnostic study of biological samples of a human for Hepatocellular carcinoma, the sample being studied for one or more proteins as a marker for Hepatocellular carcinoma, a concentration of the proteins which is elevated or decreased in relation to the healthy state indicating the presence of Hepatocellular carcinoma, a diagnostic test kit and a method of screening compounds effective in HCC.

[0001] The invention relates to specific marker proteins (biomarkers) for Hepatocellular carcinoma (HCC). The invention relates to a method for the diagnostic study of biological samples of a human for Hepatocellular carcinoma, the sample being studied for one or more proteins as a marker for Hepatocellular carcinoma, a concentration of the proteins which is elevated or decreased in relation to the healthy state indicating the presence of Hepatocellular carcinoma, a diagnostic test kit and a method of screening compounds effective in HCC.

[0002] Hepatocellular carcinoma (HCC) currently is the fifth most common malignancy worldwide with an annual incidence up to 500 per 100000 individuals depending on the geographic region investigated. Whereas 80% of new cases occur in developing countries, the incidence increases in industrialized nations including Western Europe, Japan and the United States (El-Serag H B, N. Engl. J. Med. 1999; 340:745-750). To manage patients with HCC, tumor markers are very important tools for diagnosis, evaluation of disease progression, outcome prediction and evaluation of treatment efficacy. Several tumor markers have been reported for HCC, which include α-fetoprotein (AFP) (Di Bisceglie A M J Hepatol 2005), Lens culinaris agglutinin-reactive fraction of AFP (AFP-L3) (OKA H, J Gastroenteroll Hepatol 2001), and des-γ-carboxy prothrombin (DCP) (Liebman H A N Engl J Med 1984). However, none of these tumor markers show 100% sensitivity or specificity, which calls for new and better biomarkers.

[0003] In order to identify novel biomarkers of HCC, many clinical studies utilizing omics-based methods have been reported over the past decade. In particular, the proteomics-based approach has turned out to be a promising one, offering several quantification techniques to reveal differences in protein expression that are caused by a particular disease. In the most studies reported in literature, the well-established 2D-DIGE (two-dimensional difference in gel electrophoresis) technique has been applied for protein quantification followed by identification via mass spectrometry. Even if the quantification is very accurate and sensitive in this gel-based approach, the relatively high amount of protein sample necessary for protein identification is the major disadvantage of this technique. Several mass-spectrometry-based quantitative studies using labelling-techniques like SILAC (stable isotope labelling by amino acids in cell culture) or iTRAQ (isobaric tag for relative and absolute quantification) have been carried out as well for biomarker discovery of HCC. Here, the concomitant protein quantification and identification in a mass spectrometer allows high-throughput analyses. However, such experiments imply additional labelling reactions (in case of iTRAQ) or are limited to tissue culture systems (in case of SILAC). In the latter case, one can overcome the limitation by using the isotope-labelled proteins obtained from tissue culture as an internal standard added to a corresponding tissue sample. This approach is known as CDIT (culture-derived isotope tags) and was applied in a HCC study, very recently. Label-free proteomics based on quantification by ion-intensities or spectral counting offer another possibility for biomarker discovery. These approaches are cheap due to the lacking need of any labelling reagents and furthermore allow high-throughput and sensitive analyses in a mass spectrometer. A quantitative study of HCC using spectral counting has been reported, whereas an ion-intensity-based study has not been performed yet. Apart from these quantification strategies, protein alterations in HCC have been studied by MALDI imaging.

[0004] Proceeding from the described prior art, the object therefore presents itself of providing an improved method for studying biological samples for HCC, in which novel markers are used.

[0005] The object is achieved according to the invention by a method for studying biological samples of a human for HCC the sample being studied for one or more proteins as a marker for HCC, and an elevated level of the proteins indicating the presence of HCC, the proteins being selected from a group comprising proteins defined by SEQ ID No. 1 to 983 according to the enclosed sequence listening, isoforms of the proteins defined by SEQ ID No. 1 to 983, homologous of the proteins defined by SEQ ID NO. 1 to 983 and partial sequences of SEQ ID No. 1 to 983.

[0006] The present invention relates to a quantitative proteomic study characterized in a combination of two different techniques, namely the well-established 2D-DIGE (two-dimensional difference in gel electrophoresis) and a label-free ion-intensity-based quantification via mass spectrometry and liquid chromatography to identify HCC specific biomarkers. This is the first time such a combined study was performed with regard to hepatocellular carcinoma. By comparing the results of both studies high-confident biomarker candidates of HCC could be identified and 983 proteins were confirmed as specific biomarkers for HCC. Furthermore, the comparison demonstrates the complementarity of the gel- and LC-MS-based techniques. To verify the differential protein expressions detected in the proteomic studies underlying the present invention additional immunological validations of the identified specific biomarkers for HCC were performed.

[0007] The invention relates to a method for identifying biomarkers specific for a particular disease comprising the steps
[0008] a) determining if a particular protein is differentially expressed in cause of this particular disease by 2-D gel electrophoresis and
[0009] b) determining if this particular protein is differentially expressed in cause of this particular disease by liquid chromatography-mass spectrometry (LC-MS).

[0010] In one embodiment of the method the gel-based approach is SDS-Polyacrylamide gel electrophoresis, preferably 2D-DIGE.

[0011] In one embodiment of the method the LC-MS-based approach is a LC-MS-based label-free ion-intensity-based quantification, preferably MALDI, for example MALDI-TOF-MS or nan-HPLC-ESI-MS/MS.

[0012] In a preferred embodiment the invention relates to a method, wherein the gel-based approach is 2D-DIGE and wherein the LC-MS-based approach is MALDI, preferably MALDI-TOF-MS or nan-HPLC-ESI-MS/MS.

[0013] The present invention further relates to the use of the method for identifying biomarkers specific for a particular disease, to determine if a person has this particular disease, preferably to determine, if the person has HCC. In another preferred embodiment the present invention relates to a method, wherein the particular disease is hepatocellular carcinoma (HCC).

[0014] In one embodiment of the method the differential expression of the particular protein, the specific biomarker for HCC, is determined by comparing the amount of this protein in a biological sample of a person without the disease with the amount of this protein in a person with the disease.

[0015] In another preferred aspect the present invention relates to a biomarker for HCC identified by the method and selected from the proteins defined by SEQ ID No. 1 to 983, the respective homologes of SEQ ID No. 1 to 983 with at least 95% identity in amino acid sequence, the respective isoforms of proteins defined by SEQ ID No. 1 to 983, the respective partial sequences of SEQ ID No. 1 to 983.

[0016] In one embodiment the invention relates to a biomarker for HCC, characterized in that the biomarker is selected from PPA1, IGHG1, IGHV4-31, SERPINA1, VIM, LMNA, KRT18, GAPDH, PKM2, HSPA9, HSPA5, TRAP1, ACO2, HSPA8, CCT5, ECH1, SOD1, CA2, QDPR, AGXT, SORD, GLUD1, CPS1, ALDH6A1, GRHPR, UGP2, ALDH2, ECHS1, AKR1C4, ALDH1A1, MPST, ASS1, ACADS, ALDOB, ACAADSB, KHK, SARDH, FTCD, CES1, BDH1, PBLD, FBP1, BHMT, GNMT, ALB, PPIA, MTHFD1, ACAT1, PCK2, GATM, ADH1B, ADH4, Elongation factor 2 (eEF2), Elongation factor 2 kinase, Isoform of 14-3-3 Protein Sigma, Serine/Threonine Kinase 3, Serine/Threonine Kinase 4, Serine/Threonine Kinase 31.

[0017] The invention relates to the use of one or more proteins selected from the proteins defined by SEQ ID No. 1 to 983, the respective homologes of SEQ ID No. 1 to 983 with at least 95% identity in amino acid sequence, the respective isoforms of proteins defined by SEQ ID No. 1 to 983, the respective partial sequences of SEQ ID No. 1 to 983 as biomarker(s) for hepatocellular carcinoma (HCC).

[0018] In one embodiment the invention relates to the use of one or more proteins, the specific biomarkers for HCC, wherein the protein(s) is/are selected from PPA1, IGHG1, IGHV4-31, SERPINA1, VIM, LMNA, KRT18, GAPDH, PKM2, HSPA9, HSPA5, TRAP1, ACO2, HSPA8, CCT5, ECH1, SOD1, CA2, QDPR, AGXT, SORD, GLUD1, CPS1, ALDH6A1, GRHPR, UGP2, ALDH2, ECHS1, AKR1C4, ALDH1A1, MPST, ASS1, ACADS, ALDOB, ACAADSB, KHK, SARDH, FTCD, CES1, BDH1, PBLD, FBP1, BHMT, GNMT, ALB, PPIA, MTHFD1, ACAT1, PCK2, GATM, ADH1B, ADH4, Elongation factor 2 (eEF2), Elongation factor 2 kinase, Isoform of 14-3-3 Protein Sigma, Serine/Threonine Kinase 3, Serine/Threonine Kinase 4, Serine/Threonine Kinase 31 and the respective isoforms, homologous and partial sequences of these proteins as biomarker(s) for hepatocellular carcinoma (HCC).

[0019] In another embodiment the invention relates to the use of one or more proteins, the specific biomarkers for HCC, for differential diagnosis, in particular for early recognition, diagnosis, evaluation of disease progression, prediction of outcome, evaluation of treatment, surveillance of treatment of HCC.

[0020] The present invention further relates to a method for studying a biological sample for HCC, wherein the samples is studied for one or more biomarker(s) for HCC wherein the biomarker(s) is/are differentially expressed in relation to the healthy state indicating the presence of HCC, characterized in that the biomarker(s) is/are selected from the group comprising proteins defined by SEQ ID No. 1 to 983, the respective isoforms of the proteins defined by SEQ ID. No. 1 to 983, the respective homologues of SEQ ID No. 1 to 983 with at least 95% identity in amino acid sequence, the respective partial sequences of SEQ ID No. 1 to 983.

[0021] In one embodiment of the invention the method for studying a biological sample for HCC is characterized in that the biomarker(s) is/are selected from the group comprising proteins PPA1, IGHG1, IGHV4-31, SERPINA1, VIM, LMNA, KRT18, GAPDH, PKM2, HSPA9, HSPA5, TRAP1, ACO2, HSPA8, CCT5, ECH1, SOD1, CA2, QDPR, AGXT, SORD, GLUD1, CPS1, ALDH6A1, GRHPR, UGP2, ALDH2, ECHS1, AKR1C4, ALDH1A1, MPST, ASS1, ACADS, ALDOB, ACAADSB, KHK, SARDH, FTCD, CES1, BDH1, PBLD, FBP1, BHMT, GNMT, ALB, PPIA, MTHFD1, ACAT1, PCK2, GATM, ADH1B, ADH4, Elongation factor 2 (eEF2), Elongation factor 2 kinase, Isoform of 14-3-3 Protein Sigma, Serine/Threonine Kinase 3, Serine/Threonine Kinase 4, Serine/Threonine Kinase 31 and the respective isoforms, homologous and partial sequences of these proteins.

[0022] In one embodiment of the invention the method for studying a biological sample for HCC is characterized in that the sample is a human sample.

[0023] In one embodiment of the invention the method for studying a biological sample for HCC is characterized in that the sample is blood serum, blood plasma, whole blood, a biopsy sample, in particular a liver biopsy sample.

[0024] The present invention further relates to a diagnostic device or test kit for analysing the amount of at least one biomarker selected from the group comprising proteins defined by SEQ ID No. 1 to 983, preferably proteins PPA1, IGHG1, IGHV4-31, SERPINA1, VIM, LMNA, KRT18, GAPDH, PKM2, HSPA9, HSPA5, TRAP1, ACO2, HSPA8, CCT5, ECH1, SOD1, CA2, QDPR, AGXT, SORD, GLUD1, CPS1, ALDH6A1, GRHPR, UGP2, ALDH2, ECHS1, AKR1C4, ALDH1A1, MPST, ASS1, ACADS, ALDOB, ACAADSB, KHK, SARDH, FTCD, CES1, BDH1, PBLD, FBP1, BHMT, GNMT, ALB, PPIA, MTHFD1, ACAT1, PCK2, GATM, ADH1B, ADH4, Elongation factor 2 (eEF2), Elongation factor 2 kinase, Isoform of 14-3-3 Protein Sigma, Serine/Threonine Kinase 3, Serine/Threonine Kinase 4, Serine/Threonine Kinase 31 and the respective isoforms, the respective homologues with at least 95% identity in amino acid sequence, the respective partial sequences, and wherein the diagnostic device or test kit comprises detection reagents and further aids.

[0025] In one embodiment of the invention the diagnostic device or the test kit comprises a detection reagent that comprises an antibody specific for the respective biomarker.

[0026] The invention also relates to the above described uses, characterized in that at least two of the named biomarkers are used together, either simultaneously or sequentially.

[0027] The present invention further relates to the use of a method for identifying HCC specific biomarkers in a sample and wherein the HCC specific biomarkers are defined by SEQ ID No. 1 to 983, preferably proteins PPA1, IGHG1, IGHV4-31, SERPINA1, VIM, LMNA, KRT18, GAPDH, PKM2, HSPA9, HSPA5, TRAP1, ACO2, HSPA8, CCT5, ECH1, SOD1, CA2, QDPR, AGXT, SORD, GLUD1, CPS1, ALDH6A1, GRHPR, UGP2, ALDH2, ECHS1, AKR1C4, ALDH1A1, MPST, ASS1, ACADS, ALDOB, ACAADSB, KHK, SARDH, FTCD, CES1, BDH1, PBLD, FBP1, BHMT, GNMT, ALB, PPIA, MTHFD1, ACAT1, PCK2, GATM, ADH1B, ADH4, Elongation factor 2 (eEF2), Elongation factor 2 kinase, Isoform of 14-3-3 Protein Sigma, Serine/Threonine Kinase 3, Serine/Threonine Kinase 4, Serine/Threonine Kinase 31 and the respective isoforms, the respective homologues with at least 95% identity in amino acid sequence, the respective partial sequences.

[0028] The present invention further relates to the use of specific biomarkers for HCC selected from the group of specific biomarkers comprising the proteins defined by SEQ ID No. 1 to 983, preferably PPA1, IGHG1, IGHV4-31, SERPINA1, VIM, LMNA, KRT18, GAPDH, PKM2, HSPA9, HSPA5, TRAP1, ACO2, HSPA8, CCT5, ECH1, SOD1, CA2, QDPR, AGXT, SORD, GLUD1, CPS1, ALDH6A1, GRHPR, UGP2, ALDH2, ECHS1, AKR1C4, ALDH1A1, MPST, ASS1, ACADS, ALDOB, ACAADSB, KHK, SARDH, FTCD, CES1, BDH1, PBLD, FBP1, BHMT, GNMT, ALB, PPIA, MTHFD1, ACAT1, PCK2, GATM, ADH1B, ADH4, Elongation factor 2 (eEF2), Elongation factor 2 kinase, Isoform of 14-3-3 Protein Sigma, Serine/Threonine Kinase 3, Serine/Threonine Kinase 4, Serine/Threonine Kinase 31 the respective homologues with at least 95% identity in amino acid sequence, the respective isoforms, the respective partial sequences for screening pharmaceutical compounds for HCC.

[0029] The present invention further relates to a screening assay for the identification and validation of pharmaceutical compounds comprising one or more of the proteins selected from the group comprising the proteins defined by SEQ ID No. 1 to 983, preferably proteins PPA1, IGHG1, IGHV4-31, SERPINA1, VIM, LMNA, KRT18, GAPDH, PKM2, HSPA9, HSPA5, TRAP1, ACO2, HSPA8, CCT5, ECH1, SOD1, CA2, QDPR, AGXT, SORD, GLUD1, CPS1, ALDH6A1, GRHPR, UGP2, ALDH2, ECHS1, AKR1C4, ALDH1A1, MPST, ASS1, ACADS, ALDOB, ACAADSB, KHK, SARDH, FTCD, CES1, BDH1, PBLD, FBP1, BHMT, GNMT, ALB, PPIA, MTHFD1, ACAT1, PCK2, GATM, ADH1B, ADH4, Elongation factor 2 (eEF2), Elongation factor 2 kinase, Isoform of 14-3-3 Protein Sigma, Serine/Threonine Kinase 3, Serine/Threonine Kinase 4, Serine/Threonine Kinase 31 and the respective isoforms, the respective homologues with at least 95% identity in amino acid sequence, the respective partial sequences, and wherein the screening assay comprises detection reagents and further aids.

[0030] In the context of this invention, the term HCC comprises any form of Hepatocellular carcinoma (HCC). The terms are for example defined in Pschyrembel, Klinisches Wörterbuch [Clinical Dictionary], 263th edition, 2012, Berlin).

[0031] “Specific biomarkers for HCC”, “specific biomarkers” in the context of the invention are the proteins defined by SEQ ID No. 1 to 983 according to the sequence listening. Preferred biomarkers are the proteins listed in table 3. Specific biomarkers are also the respective isoforms, humongous and partial sequences of theses proteins. According to the invention also the nucleic acids e.g. RNA, DNA, cDNA encoding for the specific biomarkers are enclosed. Instead of the respective proteins or amino acids the respective nucleic acids encoding for these biomarkers could be used for early recognition, diagnosis, evaluation of disease progression, surveillance of treatment, or after treatment. In preferred embodiments of the invention the specific biomarker for HCC is a protein or peptide, e.g. one of the proteins SEQ ID No. 1-983, one of the proteins listed in Table 3, one of the proteins listed in Table 4 or a nucleic acid that encodes for one of those proteins.

[0032] An “Isoform” of the respective protein, the specific biomarker, is any of several different forms of the same protein. Different forms of a protein may be produced from related genes, or may arise from the same gene by alternative splicing. A large number of isoforms are caused by single-nucleotide-polymorphisms or SNPs, small genetic differences between alleles of the same gene. These occur at specific individual nucleotide positions within a gene. Isoforms comprise also proteins with the same or similar amino acid sequence but different post-translational modification, like glycosylation. A glycoform is an isoform of a protein that differs only with respect to the number or type of attached glycan. Glycoproteins often consist of a number of different glycoforms, with alterations in the attached saccharide or oligosaccharide.

[0033] A “Homologue” of the respective protein, the specific biomarker, is defined in terms of shared ancestry. Two segments of DNA can have shared ancestry because of either a speciation event (orthologs) or a duplication event (paralogs). The term “percent homology” and “sequence similarity” are used interchangeably. High sequence similarity might occur because of convergent evolution or because of chance. Such sequences are similar and are also included in the term according to the invention. Sequence regions that are homologous are also called conserved. Enclosed are also partial homology where a fraction of the sequences compared (are presumed to) share descent, while the rest does not. Many algorithms exist to cluster protein sequences into sequence families, which are sets of mutually homologous sequences, see for example databses HOVERGEN, HOMOLENS, HOGENOM. According to the invention homologues should display at least 80% or 90% or 95% identify in amino acid sequence, preferably 96% or 97%, most preferably 98% or 99% with one of the sequences SEQ ID NO. 1 to 983.

[0034] “Partial Sequences” according to the invention have for example at least 50% or 60%, preferably at least 70% or 80%, most preferred at least 90% or 95% of the amino acid sequence of SEQ ID No. 1 to 983.

[0035] The specific biomarkers for HCC may be identified as potential biomarkers during a proteome analysis of HCC in comparison to non-HCC tissue. For this purpose, liver biopsy samples were taken from patients having HCC.

[0036] The proteins were labelled using a pigment and subjected to a 2-D polyacrylamide gel electrophoresis using isoelectric focusing in the first dimension and SDS gel electrophoresis in the second dimension. The results were compared for HCC and non-HCC cells with the aid of software suitable for this purpose, to detect and quantify the spots which were amplified or decreased in the HCC sample in comparison to the non-HCC sample. The emission of the pigments, with which the proteins were labelled, was measured and analyzed.

[0037] “Difference gel electrophoresis” (DIGE) is a form of gel elektrophoresis where different protein samples can be labelled with fluorescent dyes (for example Cy3, Cy5, Cy2) prior to two-dimensional electrophoresis. Then, the labelled protein samples are mixed and put in the same gel. After the gel electrophoresis, the gel is scanned with the excitation wavelength of each dye one after the other, so each sample is analyzed separately. This technique is used to see changes in protein abundance like for example, between a sample of a healthy person and a sample of a person with HCC.

[0038] It overcomes limitations in traditional 2D electrophoresis that are due to inter-gel variation. This can be considerable even with identical samples. Since the proteins from the different sample types, e.g. healthy/diseased, virulent/non-virulent, are run on the same gel they can be directly compared. To do this with traditional 2D electrophoresis requires large numbers of time consuming repeats.

[0039] To identify novel biomarker candidates of hepatocellular carcinoma a study was performed that combines two complementary techniques of quantitative proteomics, namely the gel-based 2D-DIGE and the label-free LC-MS-based approaches. Following a straightforward workflow (FIG. 1), the differential protein expression in primary liver cancer tissue (n=7) in comparison to adjacent healthy liver tissue (n=7) was analyzed.

[0040] In the gel-based approach, a total of 1366 protein spots, represented in at least 70% of all investigated spot maps, were detected. Of these, only protein spots showing significant expression changes between healthy and malignant tissue specimens (p≦0.05 and 1.5-fold change of expression) have been isolated and analyzed. By the means of MALDI-MS and nano-LC-ESI-MS/MS analyses 240 proteins (148 non-redundant proteins) have been successfully identified. Among these, 55 proteins were found to be up- and 83 proteins down-regulated in HCC tumour tissue. Ten proteins showed variable regulation directions within several detected isoforms.

[0041] In the label-free approach, 31673 features comprising charges of 2+ or 3+ were detected. Significant differences in abundance between the two experimental groups were observed for 3507 of these features. Of these, 1038 regulated features have been assigned to peptide matches by the acquired tandem mass spectra. These identifications resulted in 476 significantly regulated proteins of which 284 were found to be up-regulated in tumour tissue and 194 down-regulated, respectively.

[0042] In summary, a total of 573 differentially expressed proteins were found, whereas 97 proteins were exclusively identified in the 2D-DIGE study and 425 proteins in the LC-MS study, respectively. Hence, only 57 differential proteins were identified irrespective of the applied quantification technique, which clearly shows that both approaches are complementary (Table 3). Except of eight proteins, the regulation directions of the proteins identified in both studies were equal. In four of the eight cases of inconsistent regulations, the protein expression already varies between several isoforms detected in the gel-based approach.

[0043] An analysis of the protein localizations revealed, that by using a gel-based approach mainly cytoplasmic proteins were detected, whereas the proteins detected in label-free approach widespread over a broader range of cellular localizations, in particular the plasma membrane (FIG. 2). Again, this clearly demonstrates the complementarily of both techniques.

TABLE 3
HCC specific biomarkers

| | IPI accession | | | | |
|---|---|---|---|---|---|
| | or Uniprot | | | | |
| | Accession | Gene | | Fold changes | |
| No | No. | name | Protein name | DIGE | LC-MS |
| 1 | IPI00015018 | PPA1 | Inorganic pyrophosphatase | 2 | 5.9 |
| 2 | IPI00448925 | IGHG1 | 44 kDa protein | 2.4 | 3.9 |
| | | IGHV4-31 | | | |
| 3 | IPI00553177 | SERPINA1 | Alpha-1-antitrypsin (isoform 1) | 2.7-3.7 | 3.6 |
| 4 | IPI00418471 | VIM | Vimentin | 3.1 | 2.9 |
| 5 | IPI00021405 | LMNA | Prelamin-A/C (isoform A) | 2.8-3.7 | 2.7 |
| 6 | IPI00554788 | KRT18 | Keratin, type I cytoskeletal 18 | 1.7 | 2.4 |
| 7 | IPI00219018 | GAPDH | Glyceraldehyde-3-phosphate dehydrogenase | 2.0-3.1 | 2.4 |
| 8 | IPI00479186 | PKM2 | Pyruvate kinase isozymes M1/M2 (isoform | 3.2 | 2.3 |
| | | | M2) | | |
| 9 | IPI00007765 | HSPA9 | HSPA9 Stress-70 protein, mitochondrial | 2.7-2.8 | 2.3 |
| 10 | IPI00003362 | HSPA5 | 78 kDa glucose-regulated protein | 3.8 | 2.2 |
| 11 | IPI00030275 | TRAP1 | Heat shock protein 75 kDa, mitochondrial | 3 | 2.2 |
| 12 | IPI00017855 | ACO2 | Aconitate hydratase, mitochondrial | 2.3-2.1 | 1.7 |
| 13 | IPI00003865 | HSPA8 | Heat shock cognate 71 kDa protein (isoform | 1.7-2.7 | 1.6 |
| | | | 1) | | |
| 14 | IPI00010720 | CCT5 | T-complex protein 1 subunit epsilon | 1.8 | 1.5 |
| 15 | IPI00011416 | ECH1 | Delta(3,5)-Delta(2,4)-dienoyl-CoA isomerase, | −2 | −1.5 |
| | | | mitochondrial | | |
| 16 | IPI00218733 | SOD1 | Superoxide dismutase [Cu—Zn] | −1.9 | −1.8 |
| 17 | IPI00218414 | CA2 | Carbonic anhydrase 2 | −2.3 | −1.8 |
| 18 | IPI00014439 | QDPR | Dihydropteridine reductase | −1.8 | −2.0 |
| 19 | IPI00009367 | AGXT | Serine--pyruvate aminotransferase | −2.3 | −2.2 |
| 20 | IPI00216057 | SORD | Sorbitol dehydrogenase | −2.4 | −2.3 |
| 21 | IPI00016801 | GLUD1 | Glutamate dehydrogenase 1, mitochondrial | −3.4-1.7 | −2.4 |
| 22 | IPI00889534 | CPS1 | Carbamoyl-phosphate synthase [ammonia], | −5.1-4.4 | −2.4 |
| | | | mitochondrial (isoform a precursor) | | |
| 23 | IPI00024990 | ALDH6A1 | Methylmalonate-semialdehyde | −3.5-2.1 | −2.4 |
| | | | dehydrogenase (acylating), mitochondrial | | |
| 24 | IPI00037448 | GRHPR | Glyoxylate reductase/hydroxypyruvate | −1.9 | −2.5 |
| | | | reductase | | |
| 25 | IPI00329331 | UGP2 | UTP-glucose-1-phosphate uridylyltransferase | −2 | −2.5 |
| | | | (isoform 1) | | |
| 26 | IPI00006663 | ALDH2 | Aldehyde dehydrogenase, mitochondrial | −2.5-2.4 | −2.6 |
| 27 | IPI00024993 | ECHS1 | Enoyl-CoA hydratase, mitochondrial | −3.5-2.2 | −2.7 |
| 28 | IPI00289524 | AKR1C4 | Aldo-keto reductase family 1 member C4 | −2.0 | −2.7 |
| 29 | IPI00218914 | ALDH1A1 | Retinal dehydrogenase 1 | −1.7 | −2.7 |
| 30 | IPI00165360 | MPST | 3-Mercaptopyruvate sulfurtransferase | −2.5 | −2.8 |
| 31 | IPI00020632 | ASS1 | Argininosuccinate synthase | −2.0-1.8 | −2.8 |
| 32 | IPI00027701 | ACADS | Short-chain specific acyl-CoA | −2.1 | −2.8 |
| | | | dehydrogenase, mitochondrial | | |
| 33 | IPI00218407 | ALDOB | Fructose-bisphosphate aldolase B | −3.5-2.4 | −3.0 |
| 34 | IPI00024623 | ACADSB | Short/branched chain specific acyl-CoA | −2.1-1.6 | −3.0 |
| | | | dehydrogenase, mitochondrial | | |
| 35 | IPI00216136 | KHK | Ketohexokinase (isoform C) | −1.7 | −3.2 |
| 36 | IPI00034308 | SARDH | Sarcosine dehydrogenase, mitochondrial | −3.3-2.8 | −3.3 |
| 37 | IPI00001441 | FTCD | Formimidoyltransferase-cyclodeaminase | −3.4 | −3.3 |
| | | | (isoform A) | | |
| 38 | IPI00010180 | CES1 | Liver carboxylesterase 1 (isoform 1) | −1.9 | −3.3 |
| 39 | IPI00025341 | BDH1 | D-beta-hydroxybutyrate dehydrogenase, | −2.4 | −3.5 |
| | | | mitochondrial | | |
| 40 | IPI00024896 | PBLD | Phenazine biosynthesis-like domain- | −2.8 | −3.6 |
| | | | containing protein | | |
| 41 | IPI00073772 | FBP1 | Fructose-1,6-bisphosphatase 1 | −2.3-1.8 | −4.0 |
| 42 | IPI00004101 | BHMT | Betaine-homocysteine S-methyltransferase 1 | −3.7-3.0 | −5.6 |
| 43 | IPI00215925 | GNMT | Glycine N-methyltransferase | −3.1 | −6.3 |
| 44 | IPI00745872 | ALB | Serum albumin (isoform 1) | −3.9-3.8 | 2.4 |
| 45 | IPI00419585 | PPIA | Peptidyl-prolyl cis-trans isomerase A | −2.9-1.7 | 1.7 |
| 46 | IPI00218342 | MTHFD1 | C-1-tetrahydrofolate synthase, cytoplasmic | 1.8 | −2.1 |
| 47 | IPI00030363 | ACAT1 | Acetyl-CoA acetyltransferase, mitochondrial | 1.8 | −2.3 |
| 48 | IPI00797038 | PCK2 | Phosphoenolpyruvate carboxykinase [GTP], | 2.1-3.3 | −2.9 |
| | | | mitochondrial (isoform 1) | | |
| 49 | IPI00032103 | GATM | Glycine amidinotransferase (isoform 1), | 1.8 | −3.2 |
| | | | mitochondrial | | |
| 50 | IPI00473031 | ADH1B | Alcohol dehydrogenase 1B | −6.3-3.1 | −3.4 |
| 51 | IPI00218899 | ADH4 | Alcohol dehydrogenase 4 (isoform 2) | −2.9-2.3 | −3.6 |
| 52 | IPI00186290 | eEF2 | Elongation factor 2 | | |
| 53 | O00418 | | Eucaryotic elongation factor 2 kinase | | |
| 54 | IPI00013890 | | ISOFORM 1 OF 14-3-3 PROTEIN SIGMA. | | |
| 55 | Q13043 | | serine/threonine kinase 4 | | |
| 56 | Q13188 | | serine/threonine kinase 3 (STE20 homolog) | | |
| 57 | Q9BXU1 | | serine/threonine kinase 31 | | |

[0044] The said “IPI accession” or “Uniprot Accession” of HCC specific biomarkers refers to Table 4 and correlated SEQ ID No.

### Selection of Biomarker Candidates for Further Validation

[0045] In order to verify the observed complementarities of the applied techniques and to identify biomarker candidates of HCC, for further validations several regulated proteins that were identified either in the 2D-DIGE study, the label-free study or the overlap of both were chosen. From the proteins exclusively identified in the gel-based 2D-DIGE approach the chloride intracellular channel protein 1 (CLIC1) was chosen, comprising a 2.5-fold over-expression in tumour tissue. From the complement of the label-free LC-MS based approach the major vault protein (MVP), which showed a 5.4-fold over-expression based on quantification with six unique peptides, as well as gelsolin (GSN) with a 2.8-fold higher expression (quantified with three unique peptides) was selected. The first regulated protein was chosen from the overlap of both studies is the tumour necrosis factor receptor-associated protein 1 (TRAP1), also known as heat shock protein 75 (HSP75). For this protein, fold changes of 3.0 and 2.2 were observed in the gel- and LC-MS-based approaches, respectively. As a second candidate from this group we selected inorganic pyrophosphatase 1 (PPA1), which was detected with fold changes of 2.0 in the 2D-DIGE experiment and 5.9 in the label-free approach. As an example for a biomarker candidate down-regulated in healthy tissue in comparison to HCC-tumour tissue betaine-homocysteine S-methyltransferase 1 (BHMT) was chosen for further validation. BHMT was found to be down-regulated in both studies with fold changes ranging from −3.0 to −3.7 in the gel-based approach and −5.6 in the label-free study (FIG. 3).

### Western Blotting and Immunohistochemistry

[0046] Biomarker candidates were investigated by western blot analysis of HCC-tissue (n=8) and healthy tissue (n=8), respectively. Analysis showed differential expression of all candidates in tumorous tissue in comparison to healthy tissue. MVP showed strong expression in six of eight tumour-samples whereas weak or no expression was observed in healthy tissue. Gelsolin was found with general high expression levels in HCC-tissue and only weak expression in healthy tissue. For CLIC1 enhanced expression levels were observed in all tumour samples. TRAP1 and PPA1 also showed higher expression levels in four of eight and five of eight HCC-tissue samples, respectively. For BHMT only little expression was detected in HCC-tissue in comparison to strong expression in all samples of healthy tissue (FIG. 4).

[0047] In addition to the western blot analysis immunohistochemical stainings of CLIC1, MVP, TRAP1 and PPA1 were done to validate these potential markers using an additional method. The normal liver showed CLIC1 positive non-hepatocytes but the hepatocytes were completely negative. In HCC the tumour cells displayed a strong positive signal in the cytoplasm and in the nuclei. In addition, the stroma cells were also positive for CLIC1. The antibody against MVP showed a immunoreactive signal in the cytoplasm of HCC cells but was negative in normal hepatocytes. TRAP1 was located in the cytoplasm of HCC cells but was negative in the non-tumour liver tissue. Using the antibody against pyrophosphatase 1 the tumour cells were slightly positive in the cytoplasm while the non-tumour liver cells were negative (data not shown).

[0048] In order to identify confident biomarker candidates of HCC and to elucidate the complementarities of the gel-based and LC-MS based quantification methods, the protein lists obtained in both studies were compared. Here, we observed a small overlap of only 57 proteins identified in both studies. This clearly shows the benefit of using different techniques in combination, which leads not only to an increased number of regulated proteins, that might act as disease markers or drug targets, but moreover makes candidates identified in both studies more confident. The latter assumption is clearly corroborated by the fact that the overlap includes several proteins that have already been associated to hepatocellular carcinoma and whose disease-related dysregulation has already been reported in numerous independent studies. However, the overlap also includes several proteins that were not associated to HCC earlier (e.g. TRAP1) and that are therefore new biomarkers of HCC.

[0049] In some cases, the comparison of protein regulations showed different results in the label-free and gel-based approach, respectively. However, in at least four of eight cases, this result is definitely caused by the detection of several up- or down-regulated isoforms of the same protein in the 2D-DIGE experiment. In such cases the regulations determined by the label-free bottom-up approach seem to be more reliable regarding the overall expression change of a protein. For example, the over-expressions of alcohol dehydrogenase 4 (ADH4) or peptidylprolyl isomerase A (PPIA) in HCC tissue specimens, as observed in the label-free approach, are in line with previously published data, whereas inconclusive results were obtained in the 2D-DIGE study.

[0050] In the current study an up-regulation of TRAP1 in hepatocellular carcinoma was found. TRAP1 is a member of the HSP90 family of molecular chaperones, which consists of three other major homologues, namely HSP90α, HSP90β and 94 kDa glucose-regulated protein (GRP94). In the present study, each of the four HSP90 homologues was found to be significantly over-expressed in cause of hepatocarcinogenesis, whereas only TRAP1 was identified irrespective of the applied quantification technique. For the homologues HSP90α, HSP90β and GRP94 the observed up-regulation has already been reported regarding several carcinoma types including HCC. However, the mitochondrial TRAP1 has not yet been investigated to such an extent. TRAP1 is involved in processes like drug resistance, cell survival, stress response, mitochondrial homeostatis and protein folding. Earlier, it was found to be over-expressed in colorectal (Landriscina, Cancer Lett., 2009) and nasopharyngeal carcinoma (Wang, Transl Med, 2008) as well as cisplatin-resistant ovarian cancer cells (Alvero, Cell Cycle, 2009; Esposito, Gynecologic oncology, 2010). In the prior case, the involvement of TRAP1 in drug-resistance was additionally studied by inhibiting TRAP1 activity with shepherdin (Landriscina, Cancer Lett., 2009) resulting in higher drug sensitivity. Hence, TRAP1 is not only a promising tumour marker candidate, for e.g. HCC, but moreover a potential drug target for improved cancer therapies, for e.g. HCC.

[0051] It was found that MVP is strongly up-regulated in hepatocellular carcinoma. The relatively large variance of expression levels observed in the label-free study and by western blotting is in line with previous observations and is most likely caused by an interindividual heterogeneity of MVP expression in liver tissue. Earlier, MVP has been found to be over-expressed in several human cancers such as pancreatic, breast, ovarian, urinary bladder carcinomas, melanomas, sarcomas and leukemias. However, in case of liver carcinomas a variable expression has been reported. MVP is the main constituent of the so called vaults, which are ribonucleoprotein particles with masses of approximately 13 MDa (Reference). Initially, vaults were supposed to be directly involved in the multidrug resistance of malignant tumours due to regulation of nuclear drug transport mechanisms. However, experiments with murine MVP knockout models showed no altered nuclear transport and chemoresistance. Recent observations suggest that vaults may be indirectly involved in drug resistance by modulation of cellular growth and survival signals. Here, interaction partners of MVP in the PI3K and MAPK pathway have been identified, suggesting that MVP might act as a regulatory protein in these signalling processes. More recently, MVP has been found to be involved in resistance to epidermal growth factor inhibition of several HCC-derived cell lines.

[0052] In the gel-based approach, chloride intracellular channel protein 1 (CLIC1) was found to be up-regulated in HCC tumour tissue. Members of CLIC protein family are widely expressed and involved in a variety of cellular processes like apoptosis, cell division or secretion. An HCC-related up-regulation of CLIC1 has already been reported in a proteomic study of hepatocellular carcinoma developed in patients with chronic hepatitis C infection as an underlying disease. Earlier, transcriptomics data were published that also revealed an over-expression of CLIC1 related to HCC which is in agreement with the present data. Within the patient cohort investigated in the study according to the invention, none of the patients had hepatitis B or C infections. Hence, the over-expression of CLIC1 in HCC seems to be irrespective of the underlying disease.

[0053] The ubiquitous, Ca²⁺-regulated actin-binding protein gelsolin (GSN) was also found to be over-expressed in tumorous tissue compared to adjacent healthy tissue. The protein exists in two major isoforms, namely the intracellular cytoplasmic one (cGSN) and a secreted form, also known as plasma gelsolin (pGSN). The three regulated peptides detected in the label-free approach are shared between those forms which makes a clear decision between both forms impossible at this point. Dysregulation of gelsolin in cause of several malignancies has been reported in numerous studies. In a high number of cancer types, including human breast, colorectal, gastric, bladder, lung, prostata, kidney, ovarian, pancreatic or oral cancers, gelsolin was down-regulated leading to the assumption that gelsolin might act as a tumour suppressor. However, in a subset of non-small cell lung cancers gelsolin was over-expressed. Furthermore, increased gelsolin levels have been associated to tumour recurrence and progression in urothelial tumours. The results from the label-free study and western blots according to the present invention show that GSN is also strongly up-regulated in HCC as well.

[0054] Inorganic pyrophosphatase (PPA1) was identified as a regulated protein in the label-free and 2D-DIGE approach. It catalyzes the hydrolysis of pyrophosphate to orthophosphate and is ubiquitously expressed. It has been shown to be differentially expressed in various types of cancer including enhanced expression in primary colorectal cancer (Tomonaga et al., 2004, Clin. Canc. Res.), lung adenocarcinoma (Chen et al., 2002, Clin. Canc. Res) and prostate cancer (Lexander H, 2005, Anal. Quant. Cytol. Histol.) and has also been shown to be expressed in a hepatocellular carcinoma cell line (Liang et al., 2002, J. of Chromatography B). However, in a proteomic pilot study of HCC in which tissue samples of only three patients have been analyzed using 2D gel electrophoresis, PPA1 has been found to be down-regulated (Matos et al., 2009, Journal of Surgical Research). In the present study, it was demonstrated with a larger cohort and two different quantification methods that PPA1 is significantly up-regulated in HCC. Furthermore, this result was validated using immunological methods. Thus PPA1 is also a diagnostic marker for HCC.

[0055] A strong decrease of BHMT expression in HCC tumour tissue has already been shown in gel-based proteomic studies (Liang et al., 2005, Proteomics; Sun et al., 2007, MCP) as well as on transcript level (Avila et al., 2000, J. of Hepatology). Very recently, the transcription of an aberrant splicing variant has been described as mechanism leading to decreased BHMT levels in HCC (Pellanda et al., 2012, Int. J. of Biochem. & Cell Biol.). BHMT is involved in homocysteine metabolism where it catalyzes the synthesis of methionine from betaine and homocysteine. Loss of BHMT function therefore leads to impaired hemostasis of 1-carbon metabolism and is directly associated with various diseases including hepatocellular carcinogenesis (Teng et al., 2011, JBC). In the present study the decreased expression of BHMT in HCC was confirmed for the first time using a label-free quantification method. BHMT expression was furthermore validated using western blot analysis as an example for a biomarker candidate down-regulated in HCC tumour tissue.

[0056] The following examples and figures are used to explain the invention without restricting the invention to the examples.

[0057] FIG. 1: Schematic representation of the applied workflow.

[0058] FIG. 2: Localizations of the differentially expressed proteins detected in the 2D-DIGE or LC-MS-based approach.

[0059] FIG. 3. Regulation patterns of selected proteins. Depending on the study in which the protein was detected, spot volume of the protein (2D-DIGE) and/or feature intensity of a representative peptide (LC-MS) in HCC and healthy samples are shown. Additionally, protein regulations within the investigated patient cohort are shown in the box plots (Boxes represent 25th and 75th percentile, whiskers indicate one standard deviation, the median is shown as black bar and the mean value as an empty square within box).

[0060] FIG. 4: Western blot of biomarker candidates.

[0061] FIG. 5: Cummulated survival vs. survival with respect to eEF2 expression.

[0062] FIG. 6: eEF2-kinase activity in normal and HCC tissue.

### EXAMPLES

### Example 1

### Clinical Data

[0063] Tissue from hepatocellular carcinoma and non-tumour liver was collected from eight patients (four males and four females). The age of the patients ranged from 21 years to 76 years (mean 56.5). The tumours were classified according to the pathologic TNM (pTNM) system (seventh edition) (Sobin L H, Gospodarowicz M K, Wittekind C (2009) International union against cancer. TNM classification of malignant tumours, 7th edn. Wiley, New-York). All tumours except of one were classified as pT1, the tumor grading ranged from G1 to G3 and all tumours showed clear surgical margins. None of the patients had liver cirrhosis or hepatitis B or C infection. The patients and tumour characteristics are shown in table 1. Informed consent was obtained from every patient and the study protocol conforms to the ethical guidelines of the 1975 Declaration of Helsinki.

TABLE 1
Patient and tumour characteristics.

| ID | Gender | Age | T | N | G | V | R | Underlying liver disease |
|---|---|---|---|---|---|---|---|---|
| 1 | female | 57 | T1 | N0 | G3 | V0 | R0 | n.k. |
| 2 | female | 42 | T1 | NX | G2 | V0 | R0 | n.k. |
| 3 | male | 51 | T1 | N0 | G1 | V0 | R0 | n.k. |
| 4 | female | 21 | T2 | N1 | G2 | V1 | R0 | n.k. |
| 5 | male | 71 | T1 | NX | G3 | V0 | R0 | NASH |
| 6 | male | 65 | T1 | NX | G3 | V0 | R0 | NASH |
| 7^{a} | female | 69 | T1 | NX | G1 | V0 | R0 | n.k. |
| 8^{b} | male | 76 | T1 | NX | G1 | V0 | R0 | n.k. |

NASH = non alcoholic steatohepataitis.
n.k.= not known
NX = Regional lymph nodes cannot be assessed
^{a}From this patient, only tumour tissue was used in the proteomic study.
^{b}From this patient, only non-tumour tissue was used in the proteomic study.

### Example 2

### Tissue Preparation

[0064] Liver tumour and non-tumour tissue was collected and fixed in 4% buffered formalin, paraffin embedded and prepared for pathological examination and immunohistochemical evaluation. For the proteomics study the samples were immediately placed on ice, snap-frozen and stored at −80° C. The tissue samples were lysed by sonication (6×10 s pulses on ice) in sample buffer (30 mM TrisHCl; 2 M thiourea; 7 M urea; 4% CHAPS, pH 8.5). After centrifugation at 15.000 g for 5 min, the supernatant was collected and protein concentration was determined using the Bio-Rad Protein Assay (Bio-Rad, Hercules, Calif.).

### Example 3

### 2D-DIGE Analysis

### Example 3.1

### Protein Labelling

[0065] Proteins were labelled using cyanine dyes in the ratio 50 μg protein to 400 pmol dyes (minimal labelling dyes, GE Healthcare). The labelling reaction was performed according to the manufacturer's instructions. Samples of HCC-tissue and healthy tissue were randomized by labelling with Cy3 dye or Cy5 dye to avoid any dye biases. The internal standard, which is a mixture of same amounts of all analyzed samples, was labelled with Cy2 dye.

### Example 3.2

### 2D Electrophoresis

[0066] The seven sample mixtures, including appropriate Cy3- and Cy5-labeled pairs and a Cy2-labeled internal standard, were generated and per 100 μl cell lysate, 10 μl DTT (1.08 g/ml; BioRad) and 10 μl Ampholine 2-4 (Amersham Biosciences) were added. IEF was performed using tube gels (20 cm×0.9 mm) containing carrier ampholytes (CA-IEF) and applying a voltage gradient in an IEF-chamber produced in house. After IEF, the ejected tube gels were incubated in equilibration buffer (125 mM Tris, 40% (w/v) glycerol, 3% (w/v) SDS, 65 mM DTT, pH 6.8) for 10 min. The second dimension (SDS-PAGE) was performed on (15.2% total acrylamide, 1.3% bisacrylamide) polyacrylamide gels using a Desaphor VA 300 system. IEF tube gels were placed onto the polyacrylamide gels (20 cm×30 cm×0.7 mm) and fixed using 1.0% (w/v) agarose containing 0.01% (w/v) bromphenol blue dye (Riedel de-Haen, Seelze, Germany). For identification of proteins by MS, 250 μg total protein was applied to IEF tube gels (20 cm×1.5 mm) and subsequently to preparative SDS-PAGE gels (20 cm×30 cm×1.5 mm). Silver post-staining was performed after gel scanning using a MS-compatible protocol as described elsewhere.

### Example 3.3

### Scanning, Image Analysis and Statistics

[0067] SDS-PAGE gels were scanned using a Typhoon 9400 scanner (Amersham Biosciences). Excitation and emission wavelengths were chosen specifically for each of the dyes according to recommendations of the manufacturer. Images were pre-processed using the ImageQuant™ software (GE Healthcare). Intra-gel spot detection, inter-gel matching and normalization of spot intensities were performed using the Differential In-gel Analysis (DIA) mode and Biological Variation Analysis (BVA) mode of DeCyder 2D™ software (GE Healthcare), respectively. Spot intensities were normalized to the internal standard. The Extended Data Analysis tool (EDA), implemented in the DeCyder 2D™ software package, was used for the statistical analysis of the 2D-DIGE experiments. Here, only spots appearing in at least 70% of all analyzed and matched spot maps were chosen for further analysis. Significantly regulated proteins were identified by Student's t-test including a false-discovery-rate correction. Protein spots differentially expressed (p≦0.05, Av. Ratio 1.5) between HCC and healthy samples were identified using MALDI-TOF-MS or nano-HPLC-ESI-MS/MS.

### Example 3.4

### Digestion and Protein Identification

[0068] In-gel digestion of proteins was performed with trypsin following standard protocols and the obtained peptides were extracted from the gel matrix. MALDI-TOF-MS analyses were performed on an UltraFlex™ II instrument (Bruker Daltonics). For nano-HPLC-ESI-MS/MS experiments an Ultimate 3000 RSLCnano system online coupled to a Bruker Daltonics HCT plus ion trap instrument equipped with a nanoelectrospray ion source (Bruker Daltonics) was used. For protein identification database searches against the IPI human database were performed using Mascot. Further details regarding the experimental setup, search parameters or identification threshold were described earlier.

### Example 4

### Label-Free Analysis

### Example 4.1

### In-Gel Digestion and Sample Preparation

[0069] Prior to LC-MS analysis, 5 μg of each protein sample were loaded on a 4-20% SDS-PAGE gel (Anamed) and allowed to run into the gel for about 1 cm (15 min at 50 V). After Coomassie-staining, in-gel trypsin digestion was performed following standard procedures. The generated peptides were extracted by sonication (15 min, ice cooling) of the gel pieces in approximately 20 μl of 50% acetonitrile in 0.1% TFA, twice. Afterwards, acetonitrile was removed by vacuum centrifugation and peptide concentration of the resulting solution was determined by amino acid analysis performed on an ACQUITY-UPLC with an AccQ Tag Ultra-UPLC column (Waters, Eschborn, Germany) calibrated with Pierce Amino Acid Standard (Thermo Scientific, Bremen, Germany). Prior to LC-MS analysis, samples were diluted with 0.1% TFA to adjust a peptide concentration of 23.3 ng/μl.

### Example 4.2

### LC-MS/MS Analysis

[0070] Quantitative label-free analyses were performed on an Ultimate 3000 RSLCnano system (Dionex) online coupled to a LTQ Orbitrap Velos instrument (Thermo Scientific, Bremen, Germany). For each analysis 15 μl of sample were injected, corresponding to an amount of 350 ng tryptic digested proteins. The peptides were preconcentrated with 0.1% TFA on a trap column at a flow rate of 7 μl/min for 10 min. Subsequently, the peptides were transferred to the analytical column and separated using a xxx_min gradient from 5-40% solvent B at a flow rate of 300 nl/min (solvent A: 0.1% formic acid, solvent B: 0.1% FA 84% acetonitrile). The column oven temperature was set to 60° C. The mass spectrometer was operated in a data-dependent mode. Full scan MS spectra were acquired at a mass resolution of 30000 in the Orbitrap analyzer. Tandem mass spectra of the twenty most abundant peaks were acquired in the linear ion trap by peptide fragmentation using collision-induced dissociation.

### Example 4.3

### Peptide Quantification and Filtering

[0071] Progenesis LC-MS™ software (version, Nonlinear) was used for the ion-intensity-based label-free quantification. After importing the .raw files, one sample was selected as a reference run to which the retention times of the precursor masses in all other samples were aligned to. In the following, a list of features was generated including the m/z values of all eluted peptides at given retention times. For further analysis, only features comprising charges of 2+ and 3+ were selected. Subsequently, the raw abundances of each feature were automatically normalized for correcting experimental variations. The detailed procedure of normalization is described elsewhere. In a following step, the samples were grouped corresponding to the selected experimental design, in this case a two-group comparison between “healthy” and “HCC”. Differences of peptide abundances between both groups were assigned to be significant if the following filter criteria were satisfied (ANOVA p-value ≦0.05 and q-value ≦0.05) in the following statistical analysis. Due to the fact, that multiple MS/MS spectra were acquired for the same features, only the fragment-ion spectra of the ten most intense precursors of a feature were selected for generation of peak list exported to a Mascot generic file.

### Example 4.4

### Protein Identification

[0072] The generated .mgf file was searched against the IPI human database using Mascot. The following search parameters were applied: variable modifications propionamide (C) and oxidation (M), tryptic digestion with up to one missed cleavage, #¹³C=1, precursor ion mass tolerance of 5 ppm and fragment ion mass tolerance of 0.4 Da. For further analysis, only peptides with mascot ion scores >37 (p≦0.01 identity threshold) were chosen. By importing the list of identified peptides in Progenesis LC-MS, the previously quantified features were matched to the corresponding peptides.

### Example 4.5

### Protein Quantification and Filtering

[0073] For the protein quantification, only non-conflicting peptides were chosen and the protein-grouping function implemented in Progenesis LC-MS was disabled. However, conflicting peptides matching to more than one protein hit were used for protein identification in order to make them more confident. At the protein level, the significance of expression changes was again tested by calculating an ANOVA p-value and a q-value. Proteins not satisfying the significance criteria (ANOVA p-value ≦0.05 and q-value ≦0.05) were filtered out. Finally, proteins showing less than 1.5-fold change of expression were discarded as well.

### Example 5

### Analysis of Regulated Proteins

[0074] The Ingenuity Pathway Analysis software (Version 12402621, Ingenuity Systems, www.ingenuity.com) was used to assign the localizations of the regulated proteins detected in the label-free and 2D-DIGE experiment.

### Example 6

### Western Blotting

[0075] Protein concentration was determined by amino acid analysis. Equal amounts of 15 μg protein per sample were separated by SDS-PAGE on a 4%-20% polyacrylamide gel (Criterion TGX, Bio-Rad, Hercules, USA). Proteins were subsequently transferred onto nitrocellulose membrane (Trans-Blot Turbo, Bio-Rad, Hercules, USA) and membranes were blocked with StartingBlock blocking buffer (Thermo Scientific, Bremen, Germany) for one hour at room temperature. First antibodies anti-CLIC1 (Clone 2D4, Abnova, Heidelberg, Germany, dilution 1:1000), anti-MVP (Clone 1032, Acris, Herford, Germany, dilution 1:1000), anti-PPA1 (ab96099, abcam, Cambridge, UK, dilution 1:5000), anti-TRAP1 (clone EPR5381, abcam, Cambridge, UK, dilution 1:15000), anti-GSN (clone GS-2C4, Sigma-Aldrich, Munich, Germany, dilution 1:1000) and anti-BHMT (clone EPR6782, Epitomics, Burlingame, USA, dilution 1:20000) were diluted in StartingBlock and incubated with membranes over night at 4° C. Horseradish peroxidase-labeled secondary antibodies (Jackson ImmunoResearch, Newmarket, UK) were used for detection for one hour at room temperature. Bound antibodies were visualized by enhanced chemoluminescence and exposure to hyperfilm (GE Healthcare, Munich, Germany).

### Example 7

### Immunohistochemistry

[0076] Paraffin embedded 4 um slides were dewaxed and pre-treated in EDTA buffer (pH 9) at 95° C. for 30 min. All Immunohistochemical stains of were performed with an automated staining device (Dako Autostainer, Glostrup, Denmark). Both, the source of the primary antibodies and the technical staining details of the automatically performed stainings are listed in table 2. All stains were developed using a Polymer Kit (ZytoChemPlus (HRP), POLHRS-100, Zytomed Systems). Replacement of the various primary antibodies by mouse or rabbit immunoglobulin served as negative controls.

[0077] Immunohistochemical staining was made of HCC and the corresponding non-tumour liver from the same patient. CLIC1: Immunohistochemistry against CLIC1 shows reactivity in sinusoidal lining cells but shows no signal in hepatocytes. In HCC strong reactivity is present in the cytoplasm and nuclei of tumour cells and also in non-tumour stroma cells. MVP: In the normal liver MVP is located in some nucleated blood cells but hepatocytes are negative in contrast to HCC with positive signals in the cytoplasm of tumour cells. TRAP1: Immunohistochemistry against TRAP1 shows strong reactivity in HCC cells, but is negative in the normal liver. PPA1: The antibody against PPA1 shows a faint reactivity in HCC cells, but is completely negative in the normal liver (results not shown).

TABLE 2
Antibodies used for immunohistochemistry.

| Antibody | Distributor | Code | Source | AB concentration |
|---|---|---|---|---|
| TRAP 1 | abcam | ab109323 | Rabbit monoclonal | 1:200, 30 min. RT |
| LRP/MVP | Kamiya | MC-603 | Mouse monoclonal | 1:100, 30 min. RT |
| Pyrophosphatase-1 | abcam | ab96099 | Rabbit polyclonal | 1:500, 30 min. RT |
| CLIC1 | Abnova | H00001192-M01 | Mouse monoclonal | 1:9000, 30 min. RT |

AB:antibody
RT:room temperature

### Example 8

### eEF2 as Specific Biomarker for HCC

[0078] In validation experiments using immunhistochemistry the protein eEF2 was able to discriminate non-HCC-tissue from HCC-tissue obtained from 78 patients. The difference was significant. In addition, eEF2 distinguishes between patients with favourable prognosis and patients with unfavourable prognosis. These results were significant (n=75). FIG. 5 (left part) shows that patients with HCC and no or only little eEF immuno-expression (score 0.1) survive significant longer than patients with HCC that have many eEF-positive cells within the tumour (score 2.3). If the intensity of the staining is also taken into account when evaluating the immunhistochemical data, patients can be identified, that have a very bad prognosis. Patients with a very bad prognosis have many eEF2 positive cells within the tumour and strong reactivity (strong intensity of the staining; p<0.0001). This is shown in the right part of FIG. 5.

### Example 9

### eEF2-Kinase-Phosphorylation Assay

[0079] In addition, the kinase of eEF2 was investigated using 7 tissues from HCC patients and 7 control tissues.

[0080] Lysates from liver tissue were prepared using lysis buffer (0.5% (v/v) NP-40, 150 mM NaCl, 1 mM CaCl₂, 25 mM Na4P2O7, 50 mM β-glycerol phosphate disodium salt, 2 mM EDTA, 2 mM EGTA, 25 mM Tris, pH 8.0, 10% (v/v) glycerol, 10 μg ml⁻¹ soybean trypsin inhibitor, 1 mM benzamidine, 1 mM PMSF, 50 mM NaF, 0.1 mM Na3VO4, 0.002% (w/v) NaN3). eEF2-Kinase was immunoprecipitated using eEF2K antibodies (#3692, Cell Signaling; 5 ml/1 mg lysate) bound to Protein A sepharose beads and with gentle rotation for 2 h at 4° C. Beads were washed three to four times in phosphorylation buffer containing 50 mM Hepes (pH7.4), 10 mM MgCl₂ and 1 mM CaCl₂. For the kinase assay His-tagged eEF2 protein (eEF2 fragment corresponding to amino acids 9-165; Abcam 91684; 0.5 μg/sample), Calmodulin (2.5 mg/sample; Sigma, C4874), 10 μM ATP and [γ-³²P]ATP (0.5-0.75 μCi/sample; Fa. Hartmann) were added to immunoprecipiptated eEF2 kinase. Unspecific kinase activity was determined by addition of the eEF2 kinase inhibitor NH125 (3 μM, Calbiochem) to indicated samples. After 20 min at 30° C., the reaction was stopped by the addition of Laemmli buffer. Proteins were separated by SDS-PAGE and phosphorylation of His-eEF2 was detected and quantified by PhosphorImager analysis. Protein levels/amounts of immunoprecipitated eEF2K were controlled by Western blot analysis.

[0081] A significant difference of eEF2-kinase activity was determined between HCC and non-HCC tissue (FIG. 6).

### Example 10

### Serine/Threonine Kinase 3 and 4

[0082] Serine/threonine kinase 3 and 4 were also identified as a marker for HCC by using tumour tissue from 11 patients with HCC and 11 tissues from controls. These proteins were validated by immunhistochemical approach using tumour tissue from 290 patients. Serine/threonine kinase 3 and 4 are suitable as a diagnostic and prognostic marker for HCC.

TABLE 4
HCC specific biomarkers / proteins

| SEQ | IPI Accession | |
|---|---|---|
| ID | or Uniprot | |
| No. | Accession No. | Protein Name |
| 1 | IPI00010290 | FABP1 PROTEIN (FRAGMENT). |
| 2 | IPI00218896 | ALCOHOL DEHYDROGENASE 1A. |
| 3 | IPI00473031 | ALCOHOL DEHYDROGENASE 1B. |
| 4 | IPI00465343 | ALCOHOL DEHYDROGENASE 1C. |
| 5 | IPI00218407 | FRUCTOSE-BISPHOSPHATE ALDOLASE B. |
| 6 | IPI00410714 | HEMOGLOBIN SUBUNIT ALPHA. |
| 7 | IPI00011062 | ISOFORM 1 OF CARBAMOYL-PHOSPHATE SYNTHASE [AMMONIA], |
| | | MITOCHONDRIAL. |
| 8 | IPI00465439 | FRUCTOSE-BISPHOSPHATE ALDOLASE A. |
| 9 | IPI00006663 | ALDEHYDE DEHYDROGENASE, MITOCHONDRIAL. |
| 10 | IPI00218914 | RETINAL DEHYDROGENASE 1. |
| 11 | IPI00103467 | ALDEHYDE DEHYDROGENASE X, MITOCHONDRIAL. |
| 12 | IPI00218899 | ISOFORM 2 OF ALCOHOL DEHYDROGENASE 4. |
| 13 | IPI00158280 | FORMYLTETRAHYDROFOLATE DEHYDROGENASE ISOFORM A VARIANT. |
| 14 | IPI00448095 | L-XYLULOSE REDUCTASE. |
| 15 | IPI00004101 | BETAINE--HOMOCYSTEINE S-METHYLTRANSFERASE 1. |
| 16 | IPI00218733 | SUPEROXIDE DISMUTASE [CU—ZN]. |
| 17 | IPI00008934 | HYDROXYMETHYLGLUTARYL-COA SYNTHASE, MITOCHONDRIAL. |
| 18 | IPI00008475 | HYDROXYMETHYLGLUTARYL-COA SYNTHASE, CYTOPLASMIC. |
| 19 | IPI00554648 | KERATIN, TYPE II CYTOSKELETAL 8. |
| 20 | IPI00219446 | PHOSPHATIDYLETHANOLAMINE-BINDING PROTEIN 1. |
| 21 | IPI00016801 | GLUTAMATE DEHYDROGENASE 1, MITOCHONDRIAL. |
| 22 | IPI00010180 | ISOFORM 1 OF LIVER CARBOXYLESTERASE 1. |
| 23 | IPI00018278 | HISTONE H2A.V. |
| 24 | IPI00414676 | HEAT SHOCK PROTEIN HSP 90-BETA. |
| 25 | IPI00027230 | ENDOPLASMIN. |
| 26 | IPI00003865 | ISOFORM 1 OF HEAT SHOCK COGNATE 71 KDA PROTEIN. |
| 27 | IPI00003362 | 78 KDA GLUCOSE-REGULATED PROTEIN. |
| 28 | IPI00001539 | 3-KETOACYL-COA THIOLASE, MITOCHONDRIAL. |
| 29 | IPI00022793 | TRIFUNCTIONAL ENZYME SUBUNIT BETA, MITOCHONDRIAL. |
| 30 | IPI00020632 | ARGININOSUCCINATE SYNTHASE. |
| 31 | IPI00005038 | RIBONUCLEASE UK114. |
| 32 | IPI00456429 | UBIQUITIN-60S RIBOSOMAL PROTEIN L40. |
| 33 | IPI00382470 | ISOFORM 2 OF HEAT SHOCK PROTEIN HSP 90-ALPHA. |
| 34 | IPI00329331 | ISOFORM 1 OF UTP--GLUCOSE-1-PHOSPHATE URIDYLYLTRANSFERASE. |
| 35 | IPI00024993 | ENOYL-COA HYDRATASE, MITOCHONDRIAL. |
| 36 | IPI00216057 | SORBITOL DEHYDROGENASE. |
| 37 | IPI00018206 | ASPARTATE AMINOTRANSFERASE, MITOCHONDRIAL. |
| 38 | IPI01014563 | FERRITIN LIGHT CHAIN. |
| 39 | IPI00291560 | ISOFORM 1 OF ARGINASE-1. |
| 40 | IPI00784154 | 60 KDA HEAT SHOCK PROTEIN, MITOCHONDRIAL. |
| 41 | IPI00182933 | ISOFORM 2 OF CYTOCHROME B5. |
| 42 | IPI00220362 | 10 KDA HEAT SHOCK PROTEIN, MITOCHONDRIAL. |
| 43 | IPI00025252 | PROTEIN DISULFIDE-ISOMERASE A3. |
| 44 | IPI00019912 | PEROXISOMAL MULTIFUNCTIONAL ENZYME TYPE 2. |
| 45 | IPI00303476 | ATP SYNTHASE SUBUNIT BETA, MITOCHONDRIAL. |
| 46 | IPI00465436 | CATALASE. |
| 47 | IPI00073772 | FRUCTOSE-1,6-BISPHOSPHATASE 1. |
| 48 | IPI00217871 | DELTA-1-PYRROLINE-5-CARBOXYLATE DEHYDROGENASE, MITOCHONDRIAL. |
| 49 | IPI00797038 | ISOFORM 1 OF PHOSPHOENOLPYRUVATE CARBOXYKINASE [GTP], |
| | | MITOCHONDRIAL. |
| 50 | IPI00218297 | 4-HYDROXYPHENYLPYRUVATE DIOXYGENASE. |
| 51 | IPI00020955 | 3-OXO-5-BETA-STEROID 4-DEHYDROGENASE. |
| 52 | IPI00179709 | ISOFORM 1 OF TUBULIN ALPHA-3C/D CHAIN. |
| 53 | IPI00037448 | GLYOXYLATE REDUCTASE/HYDROXYPYRUVATE REDUCTASE. |
| 54 | IPI00217966 | ISOFORM 1 OF L-LACTATE DEHYDROGENASE A CHAIN. |
| 55 | IPI00022891 | ADP/ATP TRANSLOCASE 1. |
| 56 | IPI00029784 | UDP-GLUCURONOSYLTRANSFERASE 2B7. |
| 57 | IPI00031708 | FUMARYLACETOACETASE. |
| 58 | IPI00012728 | ISOFORM 1 OF LONG-CHAIN-FATTY-ACID--COA LIGASE 1. |
| 59 | IPI00216308 | VOLTAGE-DEPENDENT ANION-SELECTIVE CHANNEL PROTEIN 1. |
| 60 | IPI00012303 | ISOFORM 1 OF SELENIUM-BINDING PROTEIN 1. |
| 61 | IPI00645452 | UNCHARACTERIZED PROTEIN. |
| 62 | IPI00216133 | BILE SALT SULFOTRANSFERASE. |
| 63 | IPI00025512 | HEAT SHOCK PROTEIN BETA-1. |
| 64 | IPI00009904 | PROTEIN DISULFIDE-ISOMERASE A4. |
| 65 | IPI00024990 | METHYLMALONATE-SEMIALDEHYDE DEHYDROGENASE [ACYLATING], |
| | | MITOCHONDRIAL. |
| 66 | IPI00893541 | 14 KDA PROTEIN. |
| 67 | IPI00419585 | PEPTIDYL-PROLYL CIS-TRANS ISOMERASE A. |
| 68 | IPI00418169 | ISOFORM 2 OF ANNEXIN A2. |
| 69 | IPI00001441 | ISOFORM A OF FORMIMIDOYLTRANSFERASE-CYCLODEAMINASE. |
| 70 | IPI00329033 | DIMETHYLANILINE MONOOXYGENASE [N-OXIDE-FORMING] 3. |
| 71 | IPI00646304 | PEPTIDYL-PROLYL CIS-TRANS ISOMERASE B. |
| 72 | IPI00031522 | TRIFUNCTIONAL ENZYME SUBUNIT ALPHA, MITOCHONDRIAL. |
| 73 | IPI00218414 | CARBONIC ANHYDRASE 2. |
| 74 | IPI00296645 | MICROSOMAL TRIGLYCERIDE TRANSFER PROTEIN LARGE SUBUNIT. |
| 75 | IPI00396378 | ISOFORM B1 OF HETEROGENEOUS NUCLEAR RIBONUCLEOPROTEINS A2/B1. |
| 76 | IPI00010796 | PROTEIN DISULFIDE-ISOMERASE. |
| 77 | IPI00008037 | ISOFORM 1 OF LONG-CHAIN-FATTY-ACID--COA LIGASE 5. |
| 78 | IPI00300026 | SULFOTRANSFERASE 1A1. |
| 79 | IPI00005040 | ISOFORM 1 OF MEDIUM-CHAIN SPECIFIC ACYL-COA DEHYDROGENASE, |
| | | MITOCHONDRIAL. |
| 80 | IPI00009532 | CDNA FLJ56034, HIGHLY SIMILAR TO 4-AMINOBUTYRATE |
| | | AMINOTRANSFERASE, MITOCHONDRIAL. |
| 81 | IPI00551024 | BIFUNCTIONAL ATP-DEPENDENT DIHYDROXYACETONE KINASE/FAD-AMP |
| | | LYASE (CYCLIZING). |
| 82 | IPI00014439 | DIHYDROPTERIDINE REDUCTASE. |
| 83 | IPI00219526 | ISOFORM 1 OF PHOSPHOGLUCOMUTASE-1. |
| 84 | IPI00008842 | UPB1 PROTEIN (FRAGMENT). |
| 85 | IPI00007765 | STRESS-70 PROTEIN, MITOCHONDRIAL. |
| 86 | IPI00009268 | CDNA FLJ60317, HIGHLY SIMILAR TO AMINOACYLASE-1. |
| 87 | IPI00759832 | ISOFORM SHORT OF 14-3-3 PROTEIN BETA/ALPHA. |
| 88 | IPI00220642 | 14-3-3 PROTEIN GAMMA. |
| 89 | IPI00216319 | 14-3-3 PROTEIN ETA. |
| 90 | IPI00013890 | ISOFORM 1 OF 14-3-3 PROTEIN SIGMA. |
| 91 | IPI00299402 | PYRUVATE CARBOXYLASE, MITOCHONDRIAL. |
| 92 | IPI00291006 | MALATE DEHYDROGENASE, MITOCHONDRIAL. |
| 93 | IPI00006934 | HYDROXYACID OXIDASE 1. |
| 94 | IPI00002459 | UNCHARACTERIZED PROTEIN. |
| 95 | IPI00006579 | CYTOCHROME C OXIDASE SUBUNIT 4 ISOFORM 1, MITOCHONDRIAL. |
| 96 | IPI00022463 | SEROTRANSFERRIN. |
| 97 | IPI00020984 | CDNA FLJ55574, HIGHLY SIMILAR TO CALNEXIN. |
| 98 | IPI00029715 | ALDEHYDE OXIDASE. |
| 99 | IPI00244391 | XANTHINE DEHYDROGENASE/OXIDASE. |
| 100 | IPI00021405 | ISOFORM A OF PRELAMIN-A/C. |
| 101 | IPI00172593 | ISOFORM 2 OF MUTS PROTEIN HOMOLOG 5. |
| 102 | IPI00218342 | C-1-TETRAHYDROFOLATE SYNTHASE, CYTOPLASMIC. |
| 103 | IPI00550020 | PARATHYMOSIN. |
| 104 | IPI00292709 | PHOSPHOENOLPYRUVATE CARBOXYKINASE, CYTOSOLIC [GTP]. |
| 105 | IPI00002519 | ISOFORM 1 OF SERINE HYDROXYMETHYLTRANSFERASE, CYTOSOLIC. |
| 106 | IPI00021828 | CYSTATIN-B. |
| 107 | IPI01010189 | CDNA FLJ16143 FIS, CLONE BRAMY2038516, HIGHLY SIMILAR TO PROTEIN |
| | | DISULFIDE-ISOMERASE A6. |
| 108 | IPI00186290 | ELONGATION FACTOR 2. |
| 109 | IPI00218831 | ISOFORM 1 OF GLUTATHIONE S-TRANSFERASE MU 1. |
| 110 | IPI00289524 | ALDO-KETO REDUCTASE FAMILY 1 MEMBER C4. |
| 111 | IPI00011229 | CATHEPSIN D. |
| 112 | IPI00021772 | S-ADENOSYLMETHIONINE SYNTHASE ISOFORM TYPE-1. |
| 113 | IPI00000875 | CDNA FLJ56389, HIGHLY SIMILAR TO ELONGATION FACTOR 1-GAMMA. |
| 114 | IPI00028910 | DIHYDROPYRIMIDINASE. |
| 115 | IPI00215901 | ISOFORM 1 OF ADENYLATE KINASE 2, MITOCHONDRIAL. |
| 116 | IPI00013475 | TUBULIN BETA-2A CHAIN. |
| 117 | IPI00003482 | 2,4-DIENOYL-COA REDUCTASE, MITOCHONDRIAL. |
| 118 | IPI00294398 | ISOFORM 1 OF HYDROXYACYL-COENZYME A DEHYDROGENASE, |
| | | MITOCHONDRIAL. |
| 119 | IPI00024933 | ISOFORM 1 OF 60S RIBOSOMAL PROTEIN L12. |
| 120 | IPI00479877 | 4-TRIMETHYLAMINOBUTYRALDEHYDE DEHYDROGENASE. |
| 121 | IPI00783313 | GLYCOGEN PHOSPHORYLASE, LIVER FORM. |
| 122 | IPI00019502 | ISOFORM 1 OF MYOSIN-9. |
| 123 | IPI00908963 | ATP SYNTHASE SUBUNIT ALPHA. |
| 124 | IPI00028031 | CDNA FLJ56425, HIGHLY SIMILAR TO VERY-LONG-CHAIN SPECIFIC ACYL- |
| | | COADEHYDROGENASE, MITOCHONDRIAL. |
| 125 | IPI00022300 | METHYLTRANSFERASE-LIKE PROTEIN 7A. |
| 126 | IPI00219029 | ASPARTATE AMINOTRANSFERASE, CYTOPLASMIC. |
| 127 | IPI00289551 | RETINOL DEHYDROGENASE 16. |
| 128 | IPI00008905 | UDP-GLUCURONOSYLTRANSFERASE 2B15. |
| 129 | IPI00295777 | GLYCEROL-3-PHOSPHATE DEHYDROGENASE [NAD+], CYTOPLASMIC. |
| 130 | IPI00376206 | ISOFORM 2 OF 17-BETA-HYDROXYSTEROID DEHYDROGENASE 13. |
| 131 | IPI00290301 | CYTOCHROME P450 2C8. |
| 132 | IPI00007282 | CYTOCHROME P450 2E1. |
| 133 | IPI00027107 | ELONGATION FACTOR TU, MITOCHONDRIAL PRECURSOR. |
| 134 | IPI00220271 | ALCOHOL DEHYDROGENASE [NADP+]. |
| 135 | IPI00298547 | PROTEIN DJ-1. |
| 136 | IPI00328415 | ISOFORM 1 OF NADH-CYTOCHROME B5 REDUCTASE 3. |
| 137 | IPI00744692 | TRANSALDOLASE. |
| 138 | IPI00032875 | ELECTRON TRANSFER FLAVOPROTEIN-UBIQUINONE OXIDOREDUCTASE, |
| | | MITOCHONDRIAL. |
| 139 | IPI00644771 | ACYL-COENZYME A SYNTHETASE ACSM2A, MITOCHONDRIAL. |
| 140 | IPI00946864 | CDNA FLJ56274, HIGHLY SIMILAR TO TRANSKETOLASE. |
| 141 | IPI00746777 | ALCOHOL DEHYDROGENASE CLASS-3. |
| 142 | IPI00431405 | ISOFORM 2 OF NAD KINASE DOMAIN-CONTAINING PROTEIN 1. |
| 143 | IPI00016513 | RAS-RELATED PROTEIN RAB-10. |
| 144 | IPI00005719 | ISOFORM 1 OF RAS-RELATED PROTEIN RAB-1A. |
| 145 | IPI00292698 | ISOFORM 1 OF ALCOHOL DEHYDROGENASE 6. |
| 146 | IPI00012828 | 3-KETOACYL-COA THIOLASE, PEROXISOMAL. |
| 147 | IPI00293564 | HYDROXYMETHYLGLUTARYL-COA LYASE, MITOCHONDRIAL. |
| 148 | IPI00013808 | ALPHA-ACTININ-4. |
| 149 | IPI00012493 | 40S RIBOSOMAL PROTEIN S20. |
| 150 | IPI00218482 | ISOFORM SHORT OF ES1 PROTEIN HOMOLOG, MITOCHONDRIAL. |
| 151 | IPI00025874 | DOLICHYL-DIPHOSPHOOLIGOSACCHARIDE--PROTEIN GLYCOSYLTRANSFERASE |
| | | SUBUNIT 1 PRECURSOR. |
| 152 | IPI00007219 | CYTOCHROME P450 2C9. |
| 153 | IPI00219525 | 6-PHOSPHOGLUCONATE DEHYDROGENASE, DECARBOXYLATING. |
| 154 | IPI00031131 | ISOFORM 1 OF ADIPOCYTE PLASMA MEMBRANE-ASSOCIATED PROTEIN. |
| 155 | IPI00221091 | 40S RIBOSOMAL PROTEIN S15A. |
| 156 | IPI00005682 | CORTICOSTEROID 11-BETA-DEHYDROGENASE ISOZYME 1. |
| 157 | IPI00028055 | TRANSMEMBRANE EMP24 DOMAIN-CONTAINING PROTEIN 10. |
| 158 | IPI00021842 | APOLIPOPROTEIN E. |
| 159 | IPI00643041 | GTP-BINDING NUCLEAR PROTEIN RAN. |
| 160 | IPI00165360 | 3-MERCAPTOPYRUVATE SULFURTRANSFERASE. |
| 161 | IPI00339319 | ISOFORM 11 OF FIBRONECTIN. |
| 162 | IPI00651653 | PROBABLE ATP-DEPENDENT RNA HELICASE DDX17 ISOFORM 3. |
| 163 | IPI00011253 | 40S RIBOSOMAL PROTEIN S3. |
| 164 | IPI00013917 | 40S RIBOSOMAL PROTEIN S12. |
| 165 | IPI00964764 | CDNA FLJ55072, HIGHLY SIMILAR TO SUCCINATE DEHYDROGENASE |
| | | (UBIQUINONE) FLAVOPROTEIN SUBUNIT, MITOCHONDRIAL. |
| 166 | IPI00009328 | EUKARYOTIC INITIATION FACTOR 4A-III. |
| 167 | IPI00011200 | D-3-PHOSPHOGLYCERATE DEHYDROGENASE. |
| 168 | IPI00032826 | HSC70-INTERACTING PROTEIN. |
| 169 | IPI00026271 | 40S RIBOSOMAL PROTEIN S14. |
| 170 | IPI00383046 | CARBOXYMETHYLENEBUTENOLIDASE HOMOLOG. |
| 171 | IPI00642042 | PUTATIVE UNCHARACTERIZED PROTEIN DKFZP686J1372. |
| 172 | IPI00024067 | ISOFORM 1 OF CLATHRIN HEAVY CHAIN 1. |
| 173 | IPI00337335 | ISOFORM 1 OF MYOSIN-14. |
| 174 | IPI00104341 | CDNA FLJ59619, HIGHLY SIMILAR TO EPOXIDE HYDROLASE 2. |
| 175 | IPI00000690 | ISOFORM 1 OF APOPTOSIS-INDUCING FACTOR 1, MITOCHONDRIAL. |
| 176 | IPI00305360 | AGMATINASE, MITOCHONDRIAL. |
| 177 | IPI00024623 | SHORT/BRANCHED CHAIN SPECIFIC ACYL-COA DEHYDROGENASE, |
| | | MITOCHONDRIAL. |
| 178 | IPI00419237 | ISOFORM 1 OF CYTOSOL AMINOPEPTIDASE. |
| 179 | IPI00216049 | ISOFORM 1 OF HETEROGENEOUS NUCLEAR RIBONUCLEOPROTEIN K. |
| 180 | IPI00303174 | HOMOGENTISATE 1,2-DIOXYGENASE. |
| 181 | IPI00419802 | ISOFORM 1 OF 3-HYDROXYISOBUTYRYL-COA HYDROLASE, MITOCHONDRIAL. |
| 182 | IPI00943181 | UNCHARACTERIZED PROTEIN. |
| 183 | IPI00216951 | ASPARTYL-TRNA SYNTHETASE, CYTOPLASMIC. |
| 184 | IPI00293721 | AFLATOXIN B1 ALDEHYDE REDUCTASE MEMBER 3. |
| 185 | IPI00027701 | SHORT-CHAIN SPECIFIC ACYL-COA DEHYDROGENASE, MITOCHONDRIAL. |
| 186 | IPI00292657 | PROSTAGLANDIN REDUCTASE 1. |
| 187 | IPI00026154 | CDNA FLJ59211, HIGHLY SIMILAR TO GLUCOSIDASE 2 SUBUNIT BETA. |
| 188 | IPI00604620 | NUCLEOLIN. |
| 189 | IPI00030363 | ACETYL-COA ACETYLTRANSFERASE, MITOCHONDRIAL. |
| 190 | IPI00018272 | PYRIDOXINE-5′-PHOSPHATE OXIDASE. |
| 191 | IPI00016610 | POLY(RC)-BINDING PROTEIN 1. |
| 192 | IPI00009375 | ISOFORM 1 OF 3-HYDROXYANTHRANILATE 3,4-DIOXYGENASE. |
| 193 | IPI00024896 | PHENAZINE BIOSYNTHESIS-LIKE DOMAIN-CONTAINING PROTEIN. |
| 194 | IPI00016827 | BILE ACYL-COA SYNTHETASE. |
| 195 | IPI00303954 | CYTOCHROME B5 TYPE B PRECURSOR. |
| 196 | IPI00442121 | ISOFORM 2 OF DELTA-AMINOLEVULINIC ACID DEHYDRATASE. |
| 197 | IPI00549467 | OMEGA-AMIDASE NIT2. |
| 198 | IPI00009368 | SIDEROFLEXIN-1. |
| 199 | IPI00023048 | ISOFORM 1 OF ELONGATION FACTOR 1-DELTA. |
| 200 | IPI00848226 | GUANINE NUCLEOTIDE-BINDING PROTEIN SUBUNIT BETA-2-LIKE 1. |
| 201 | IPI00217975 | LAMIN-B1. |
| 202 | IPI00216592 | ISOFORM Cl OF HETEROGENEOUS NUCLEAR RIBONUCLEOPROTEINS C1/C2. |
| 203 | IPI00215983 | CARBONIC ANHYDRASE 1. |
| 204 | IPI00549725 | PHOSPHOGLYCERATE MUTASE 1. |
| 205 | IPI00009634 | SULFIDE:QUINONE OXIDOREDUCTASE, MITOCHONDRIAL. |
| 206 | IPI00903278 | P37 AUF1. |
| 207 | IPI00413108 | 33 KDA PROTEIN. |
| 208 | IPI00759644 | PEPTIDYL-PROLYL CIS-TRANS ISOMERASE FKBP1A ISOFORM B. |
| 209 | IPI00216691 | PROFILIN-1. |
| 210 | IPI00001734 | PHOSPHOSERINE AMINOTRANSFERASE. |
| 211 | IPI00006443 | ISOFORM 1 OF LAMBDA-CRYSTALLIN HOMOLOG. |
| 212 | IPI00024934 | METHYLMALONYL-COA MUTASE, MITOCHONDRIAL. |
| 213 | IPI00177728 | ISOFORM 1 OF CYTOSOLIC NON-SPECIFIC DIPEPTIDASE. |
| 214 | IPI00178440 | ELONGATION FACTOR 1-BETA. |
| 215 | IPI00376798 | ISOFORM 1 OF 60S RIBOSOMAL PROTEIN L11. |
| 216 | IPI00550363 | TRANSGELIN-2. |
| 217 | IPI00748411 | SERINE HYDROXYMETHYLTRANSFERASE. |
| 218 | IPI00171903 | ISOFORM 1 OF HETEROGENEOUS NUCLEAR RIBONUCLEOPROTEIN M. |
| 219 | IPI00219207 | ISOFORM 3 OF RETICULON-4. |
| 220 | IPI00221222 | ACTIVATED RNA POLYMERASE II TRANSCRIPTIONAL COACTIVATOR P15. |
| 221 | IPI00219153 | 60S RIBOSOMAL PROTEIN L22. |
| 222 | IPI00032258 | COMPLEMENT C4-A. |
| 223 | IPI00465138 | CYTOCHROME P450 3A4. |
| 224 | IPI00217458 | ALANINE AMINOTRANSFERASE 1. |
| 225 | IPI00023542 | TRANSMEMBRANE EMP24 DOMAIN-CONTAINING PROTEIN 9. |
| 226 | IPI00063827 | ISOFORM 1 OF ABHYDROLASE DOMAIN-CONTAINING PROTEIN 14B. |
| 227 | IPI00024145 | ISOFORM 2 OF VOLTAGE-DEPENDENT ANION-SELECTIVE CHANNEL PROTEIN 2. |
| 228 | IPI00909853 | CDNA, FLJ78842, MODERATELY SIMILAR TO D-DOPACHROME |
| | | DECARBOXYLASE. |
| 229 | IPI00015018 | INORGANIC PYROPHOSPHATASE. |
| 230 | IPI00031557 | ISOFORM 1 OF CYSTATHIONINE GAMMA-LYASE. |
| 231 | IPI00215914 | ADP-RIBOSYLATION FACTOR 1. |
| 232 | IPI00026530 | PROTEIN ERGIC-53. |
| 233 | IPI00307246 | ISOFORM 2 OF CYTOCHROME P450 1A2. |
| 234 | IPI00006482 | ISOFORM LONG OF SODIUM/POTASSIUM-TRANSPORTING ATPASE SUBUNIT |
| | | ALPHA-1. |
| 235 | IPI00645078 | UBIQUITIN-LIKE MODIFIER-ACTIVATING ENZYME 1. |
| 236 | IPI00294911 | SUCCINATE DEHYDROGENASE [UBIQUINONE] IRON-SULFUR SUBUNIT, |
| | | MITOCHONDRIAL. |
| 237 | IPI00216136 | ISOFORM C OF KETOHEXOKINASE. |
| 238 | IPI00552715 | T-COMPLEX PROTEIN 1 SUBUNIT GAMMA ISOFORM C. |
| 239 | IPI00383581 | CDNA FLJ61290, HIGHLY SIMILAR TO NEUTRAL ALPHA-GLUCOSIDASE AB. |
| 240 | IPI00025341 | D-BETA-HYDROXYBUTYRATE DEHYDROGENASE, MITOCHONDRIAL. |
| 241 | IPI00843789 | GLYCINE DEHYDROGENASE [DECARBOXYLATING], MITOCHONDRIAL. |
| 242 | IPI00215925 | GLYCINE N-METHYLTRANSFERASE. |
| 243 | IPI00402759 | ISOFORM 1 OF GLYCINE N-ACYLTRANSFERASE. |
| 244 | IPI00411706 | S-FORMYLGLUTATHIONE HYDROLASE. |
| 245 | IPI00329742 | FUMARYLACETOACETATE HYDROLASE DOMAIN-CONTAINING PROTEIN 2A. |
| 246 | IPI00140420 | STAPHYLOCOCCAL NUCLEASE DOMAIN-CONTAINING PROTEIN 1. |
| 247 | IPI00220219 | COATOMER SUBUNIT BETA′. |
| 248 | IPI00215965 | ISOFORM Al-B OF HETEROGENEOUS NUCLEAR RIBONUCLEOPROTEIN Al. |
| 249 | IPI00017579 | PHENYLALANINE-4-HYDROXYLASE. |
| 250 | IPI00026230 | HETEROGENEOUS NUCLEAR RIBONUCLEOPROTEIN H2. |
| 251 | IPI00556579 | MALEYLACETOACETATE ISOMERASE ISOFORM 1. |
| 252 | IPI00219291 | UNCHARACTERIZED PROTEIN. |
| 253 | IPI00293125 | PEROXISOMAL ACYL-COENZYME A OXIDASE 2. |
| 254 | IPI00011603 | 26S PROTEASOME NON-ATPASE REGULATORY SUBUNIT 3. |
| 255 | IPI00179964 | ISOFORM 1 OF POLYPYRIMIDINE TRACT-BINDING PROTEIN 1. |
| 256 | IPI00215918 | ADP-RIBOSYLATION FACTOR 4. |
| 257 | IPI00298971 | VITRONECTIN. |
| 258 | IPI00872799 | ISOFORM 1 OF CYTOCHROME P450 4A11. |
| 259 | IPI00141318 | CYTOSKELETON-ASSOCIATED PROTEIN 4. |
| 260 | IPI00843996 | CDNA FLJ52832, HIGHLY SIMILAR TO SPLICING FACTOR, ARGININE/SERINE- |
| | | RICH 3. |
| 261 | IPI00003990 | ISOFORM 2 OF VALACYCLOVIR HYDROLASE. |
| 262 | IPI00514126 | ISOFORM 1 OF GLYCOGEN DEBRANCHING ENZYME. |
| 263 | IPI00169383 | PHOSPHOGLYCERATE KINASE 1. |
| 264 | IPI00018140 | ISOFORM 1 OF HETEROGENEOUS NUCLEAR RIBONUCLEOPROTEIN Q. |
| 265 | IPI00012074 | ISOFORM 1 OF HETEROGENEOUS NUCLEAR RIBONUCLEOPROTEIN R. |
| 266 | IPI00008524 | ISOFORM 1 OF POLYADENYLATE-BINDING PROTEIN 1. |
| 267 | IPI00479217 | ISOFORM SHORT OF HETEROGENEOUS NUCLEAR RIBONUCLEOPROTEIN U. |
| 268 | IPI00976385 | ENOLASE. |
| 269 | IPI00028635 | DOLICHYL-DIPHOSPHOOLIGOSACCHARIDE--PROTEIN GLYCOSYLTRANSFERASE |
| | | SUBUNIT 2. |
| 270 | IPI00747849 | ISOFORM 1 OF SODIUM/POTASSIUM-TRANSPORTING ATPASE SUBUNIT |
| | | BETA-1. |
| 271 | IPI00043499 | UROCANATE HYDRATASE. |
| 272 | IPI00295363 | ORNITHINE CARBAMOYLTRANSFERASE, MITOCHONDRIAL. |
| 273 | IPI00032103 | ISOFORM 1 OF GLYCINE AMIDINOTRANSFERASE, MITOCHONDRIAL. |
| 274 | IPI00010896 | CHLORIDE INTRACELLULAR CHANNEL PROTEIN 1. |
| 275 | IPI00013296 | 40S RIBOSOMAL PROTEIN S18. |
| 276 | IPI00016339 | RAS-RELATED PROTEIN RAB-5C. |
| 277 | IPI00299000 | PROLIFERATION-ASSOCIATED PROTEIN 2G4. |
| 278 | IPI00218200 | B-CELL RECEPTOR-ASSOCIATED PROTEIN 31. |
| 279 | IPI00296196 | DIMETHYLGLYCINE DEHYDROGENASE, MITOCHONDRIAL. |
| 280 | IPI00844040 | CDNA FLJ59759, HIGHLY SIMILAR TO PROTEIN SET. |
| 281 | IPI00017964 | SMALL NUCLEAR RIBONUCLEOPROTEIN SM D3. |
| 282 | IPI00794561 | CDNA FLJ51998, HIGHLY SIMILAR TO RAS-RELATED PROTEIN RAB-2A. |
| 283 | IPI00296635 | 1,4-ALPHA-GLUCAN-BRANCHING ENZYME. |
| 284 | IPI00000792 | QUINONE OXIDOREDUCTASE. |
| 285 | IPI00291939 | STRUCTURAL MAINTENANCE OF CHROMOSOMES PROTEIN 1A. |
| 286 | IPI00332371 | ISOFORM 1 OF 6-PHOSPHOFRUCTOKINASE, LIVER TYPE. |
| 287 | IPI00219352 | ISOFORM 1 OF CYSTATHIONINE BETA-SYNTHASE. |
| 288 | IPI00295857 | ISOFORM 1 OF COATOMER SUBUNIT ALPHA. |
| 289 | IPI00010740 | ISOFORM LONG OF SPLICING FACTOR, PROLINE- AND GLUTAMINE-RICH. |
| 290 | IPI00473014 | DESTRIN. |
| 291 | IPI00376844 | PUTATIVE UBIQUITIN-CONJUGATING ENZYME E2 N-LIKE. |
| 292 | IPI00027442 | ALANYL-TRNA SYNTHETASE, CYTOPLASMIC. |
| 293 | IPI00299778 | SERUM PARAOXONASE/LACTONASE 3. |
| 294 | IPI00604664 | NADH-UBIQUINONE OXIDOREDUCTASE 75 KDA SUBUNIT, MITOCHONDRIAL |
| | | ISOFORM 5. |
| 295 | IPI00220342 | N(G),N(G)-DIMETHYLARGININE DIMETHYLAMINOHYDROLASE 1. |
| 296 | IPI00002460 | ISOFORM 1 OF ANNEXIN A7. |
| 297 | IPI00019485 | ISOFORM 2 OF ENOYL-COA HYDRATASE DOMAIN-CONTAINING PROTEIN 2, |
| | | MITOCHONDRIAL. |
| 298 | IPI00465256 | GTP:AMP PHOSPHOTRANSFERASE, MITOCHONDRIAL. |
| 299 | IPI00017672 | CDNA FLJ25678 FIS, CLONE TST04067, HIGHLY SIMILAR TO PURINE |
| | | NUCLEOSIDE PHOSPHORYLASE. |
| 300 | IPI00744115 | ISOFORM 1 OF PROPIONYL-COA CARBOXYLASE ALPHA CHAIN, |
| | | MITOCHONDRIAL. |
| 301 | IPI00332828 | COCAINE ESTERASE ISOFORM 1. |
| 302 | IPI00009507 | ISOFORM 1 OF SYNAPTOPHYSIN-LIKE PROTEIN 1. |
| 303 | IPI00029046 | MALECTIN. |
| 304 | IPI00298828 | BETA-2-GLYCOPROTEIN 1. |
| 305 | IPI00021766 | ISOFORM 1 OF RETICULON-4. |
| 306 | IPI00246058 | PROGRAMMED CELL DEATH 6-INTERACTING PROTEIN. |
| 307 | IPI00300567 | ISOFORM 1 OF ENOYL-COA DELTA ISOMERASE 1, MITOCHONDRIAL. |
| 308 | IPI00020956 | HEPATOMA-DERIVED GROWTH FACTOR. |
| 309 | IPI01011543 | CDNA FLJ45429 FIS, CLONE BRHIP3039057, HIGHLY SIMILAR TO PROTEIN |
| | | TRANSPORT PROTEIN SEC23A. |
| 310 | IPI00018465 | T-COMPLEX PROTEIN 1 SUBUNIT ETA. |
| 311 | IPI00412579 | 60S RIBOSOMAL PROTEIN L10A. |
| 312 | IPI00011107 | ISOCITRATE DEHYDROGENASE [NADP], MITOCHONDRIAL. |
| 313 | IPI00914566 | FARNESYL PYROPHOSPHATE SYNTHASE. |
| 314 | IPI00443909 | ISOFORM 1 OF PROTEIN CANOPY HOMOLOG 2. |
| 315 | IPI00022822 | ISOFORM 2 OF COLLAGEN ALPHA-1(XVIII) CHAIN. |
| 316 | IPI00305152 | ISOFORM 3 OF PROTEIN TRANSPORT PROTEIN SEC31A. |
| 317 | IPI00024157 | PEPTIDYL-PROLYL CIS-TRANS ISOMERASE FKBP3. |
| 318 | IPI00900293 | FILAMIN-B ISOFORM 1. |
| 319 | IPI00219678 | EUKARYOTIC TRANSLATION INITIATION FACTOR 2 SUBUNIT 1. |
| 320 | IPI00012912 | CARNITINE O-PALMITOYLTRANSFERASE 2, MITOCHONDRIAL. |
| 321 | IPI00298520 | UNCHARACTERIZED PROTEIN. |
| 322 | IPI00171391 | ISOFORM 1 OF ALDEHYDE DEHYDROGENASE FAMILY 8 MEMBER Al. |
| 323 | IPI00025084 | CALPAIN SMALL SUBUNIT 1. |
| 324 | IPI00009440 | 7-ALPHA-HYDROXYCHOLEST-4-EN-3-ONE 12-ALPHA-HYDROXYLASE. |
| 325 | IPI00217477 | HIGH MOBILITY GROUP PROTEIN B3. |
| 326 | IPI00220834 | X-RAY REPAIR CROSS-COMPLEMENTING PROTEIN 5. |
| 327 | IPI00021890 | ESTRADIOL 17-BETA-DEHYDROGENASE 8. |
| 328 | IPI00029744 | SINGLE-STRANDED DNA-BINDING PROTEIN, MITOCHONDRIAL. |
| 329 | IPI00797126 | UNCHARACTERIZED PROTEIN. |
| 330 | IPI00479786 | ISOFORM 1 OF FAR UPSTREAM ELEMENT-BINDING PROTEIN 2. |
| 331 | IPI00019385 | TRANSLOCON-ASSOCIATED PROTEIN SUBUNIT DELTA. |
| 332 | IPI00220644 | ISOFORM M1 OF PYRUVATE KINASE ISOZYMES M1/M2. |
| 333 | IPI00009960 | ISOFORM 1 OF MITOCHONDRIAL INNER MEMBRANE PROTEIN. |
| 334 | IPI00916847 | 47 KDA PROTEIN. |
| 335 | IPI00215637 | ATP-DEPENDENT RNA HELICASE DDX3X. |
| 336 | IPI00032825 | TRANSMEMBRANE EMP24 DOMAIN-CONTAINING PROTEIN 7. |
| 337 | IPI00644712 | X-RAY REPAIR CROSS-COMPLEMENTING PROTEIN 6. |
| 338 | IPI00030023 | HISTAMINE N-METHYLTRANSFERASE. |
| 339 | IPI00302850 | SMALL NUCLEAR RIBONUCLEOPROTEIN SM D1. |
| 340 | IPI00301021 | ISOFORM 1 OF TRANSLOCON-ASSOCIATED PROTEIN SUBUNIT ALPHA. |
| 341 | IPI00023526 | ISOFORM 1 OF RAS-RELATED PROTEIN RAB-6A. |
| 342 | IPI00783271 | LEUCINE-RICH PPR MOTIF-CONTAINING PROTEIN, MITOCHONDRIAL. |
| 343 | IPI00296913 | ADP-SUGAR PYROPHOSPHATASE. |
| 344 | IPI00305461 | INTER-ALPHA (GLOBULIN) INHIBITOR H2, ISOFORM CRA_A. |
| 345 | IPI00029737 | ISOFORM LONG OF LONG-CHAIN-FATTY-ACID--COA LIGASE 4. |
| 346 | IPI00022228 | VIGILIN. |
| 347 | IPI00302925 | 59 KDA PROTEIN. |
| 348 | IPI00304692 | HETEROGENEOUS NUCLEAR RIBONUCLEOPROTEIN G. |
| 349 | IPI01014975 | UNCHARACTERIZED PROTEIN. |
| 350 | IPI00147874 | SIALIC ACID SYNTHASE. |
| 351 | IPI00011284 | ISOFORM MEMBRANE-BOUND OF CATECHOL O-METHYLTRANSFERASE. |
| 352 | IPI00218015 | ISOFORM 2 OF PROBABLE D-LACTATE DEHYDROGENASE, MITOCHONDRIAL. |
| 353 | IPI00006865 | VESICLE-TRAFFICKING PROTEIN SEC22B. |
| 354 | IPI00927606 | GLUTATHIONE PEROXIDASE 1. |
| 355 | IPI00026302 | 60S RIBOSOMAL PROTEIN L31. |
| 356 | IPI00221354 | ISOFORM SHORT OF RNA-BINDING PROTEIN FUS. |
| 357 | IPI00012007 | ADENOSYLHOMOCYSTEINASE. |
| 358 | IPI00177817 | ISOFORM 2 OF SARCOPLASMIC/ENDOPLASMIC RETICULUM CALCIUM |
| | | ATPASE 2. |
| 359 | IPI00005198 | INTERLEUKIN ENHANCER-BINDING FACTOR 2. |
| 360 | IPI00844578 | ATP-DEPENDENT RNA HELICASE A. |
| 361 | IPI00021805 | MICROSOMAL GLUTATHIONE S-TRANSFERASE 1. |
| 362 | IPI00063234 | UNCHARACTERIZED PROTEIN. |
| 363 | IPI00030781 | ISOFORM ALPHA OF SIGNAL TRANSDUCER AND ACTIVATOR OF |
| | | TRANSCRIPTION 1- ALPHA/BETA. |
| 364 | IPI00007247 | PROPIONYL-COA CARBOXYLASE BETA CHAIN, MITOCHONDRIAL. |
| 365 | IPI00643720 | ISOFORM 1 OF 2-OXOGLUTARATE DEHYDROGENASE-LIKE, MITOCHONDRIAL. |
| 366 | IPI00029631 | ENHANCER OF RUDIMENTARY HOMOLOG. |
| 367 | IPI00100160 | ISOFORM 1 OF CULLIN-ASSOCIATED NEDD8-DISSOCIATED PROTEIN 1. |
| 368 | IPI00018398 | 26S PROTEASE REGULATORY SUBUNIT 6A. |
| 369 | IPI00945507 | SUCCINYL-COA LIGASE [GDP-FORMING] SUBUNIT BETA, MITOCHONDRIAL |
| | | ISOFORM 1 PRECURSOR. |
| 370 | IPI00646917 | CLEAVAGE AND POLYADENYLATION SPECIFICITY FACTOR SUBUNIT 5. |
| 371 | IPI00301936 | CDNA FLJ60076, HIGHLY SIMILAR TO ELAV-LIKE PROTEIN 1. |
| 372 | IPI00017283 | ISOLEUCYL-TRNA SYNTHETASE, MITOCHONDRIAL. |
| 373 | IPI00783982 | COATOMER SUBUNIT GAMMA. |
| 374 | IPI00021435 | 26S PROTEASE REGULATORY SUBUNIT 7. |
| 375 | IPI00024580 | METHYLCROTONOYL-COA CARBOXYLASE SUBUNIT ALPHA, MITOCHONDRIAL. |
| 376 | IPI00008994 | ISOFORM 1 OF PROTEIN NDRG2. |
| 377 | IPI00290279 | ISOFORM LONG OF ADENOSINE KINASE. |
| 378 | IPI00554786 | ISOFORM 5 OF THIOREDOXIN REDUCTASE 1, CYTOPLASMIC. |
| 379 | IPI00009841 | RNA-BINDING PROTEIN EWS ISOFORM 1. |
| 380 | IPI00032220 | ANGIOTENSINOGEN. |
| 381 | IPI00168479 | CDNA FLJ56357, HIGHLY SIMILAR TO HOMO SAPIENS APOLIPOPROTEIN A-I |
| | | BINDING PROTEIN (APOA1BP), MRNA. |
| 382 | IPI00027834 | HETEROGENEOUS NUCLEAR RIBONUCLEOPROTEIN L. |
| 383 | IPI00872762 | SUCCINYL-COA LIGASE [GDP-FORMING] SUBUNIT ALPHA, MITOCHONDRIAL. |
| 384 | IPI00927150 | UNCHARACTERIZED PROTEIN. |
| 385 | IPI00796366 | CDNA FLJ56329, HIGHLY SIMILAR TO MYOSIN LIGHT POLYPEPTIDE 6. |
| 386 | IPI00010130 | GLUTAMINE SYNTHETASE. |
| 387 | IPI00295098 | SIGNAL RECOGNITION PARTICLE RECEPTOR SUBUNIT BETA. |
| 388 | IPI00926977 | 26S PROTEASE REGULATORY SUBUNIT 10B. |
| 389 | IPI00017526 | PROTEIN S100-P. |
| 390 | IPI00008418 | DIABLO HOMOLOG, MITOCHONDRIAL PRECURSOR. |
| 391 | IPI00009950 | VESICULAR INTEGRAL-MEMBRANE PROTEIN VIP36. |
| 392 | IPI00030702 | ISOFORM 1 OF ISOCITRATE DEHYDROGENASE [NAD] SUBUNIT ALPHA, |
| | | MITOCHONDRIAL. |
| 393 | IPI00009032 | LUPUS LA PROTEIN. |
| 394 | IPI00003881 | HETEROGENEOUS NUCLEAR RIBONUCLEOPROTEIN F. |
| 395 | IPI00026167 | NHP2-LIKE PROTEIN 1. |
| 396 | IPI00024466 | ISOFORM 1 OF UDP-GLUCOSE:GLYCOPROTEIN GLUCOSYLTRANSFERASE 1. |
| 397 | IPI00027285 | ISOFORM SM-B′ OF SMALL NUCLEAR RIBONUCLEOPROTEIN-ASSOCIATED |
| | | PROTEINS B AND B′. |
| 398 | IPI00219330 | ISOFORM 5 OF INTERLEUKIN ENHANCER-BINDING FACTOR 3. |
| 399 | IPI00030962 | ISOFORM 5 OF UBIQUITIN-CONJUGATING ENZYME E2 VARIANT 1. |
| 400 | IPI00007940 | ERLIN-1. |
| 401 | IPI00030131 | ISOFORM BETA OF LAMINA-ASSOCIATED POLYPEPTIDE 2, ISOFORMS |
| | | BETA/GAMMA. |
| 402 | IPI00001639 | IMPORTIN SUBUNIT BETA-1. |
| 403 | IPI00002966 | HEAT SHOCK 70 KDA PROTEIN 4. |
| 404 | IPI00000873 | VALYL-TRNA SYNTHETASE. |
| 405 | IPI00449049 | POLY [ADP-RIBOSE] POLYMERASE 1. |
| 406 | IPI00419880 | 40S RIBOSOMAL PROTEIN S3A. |
| 407 | IPI00289499 | BIFUNCTIONAL PURINE BIOSYNTHESIS PROTEIN PURH. |
| 408 | IPI00028520 | ISOFORM 1 OF NADH DEHYDROGENASE [UBIQUINONE] FLAVOPROTEIN 1, |
| | | MITOCHONDRIAL. |
| 409 | IPI00550689 | TRNA-SPLICING LIGASE RTCB HOMO LOG. |
| 410 | IPI00396370 | ISOFORM 1 OF EUKARYOTIC TRANSLATION INITIATION FACTOR 3 SUBUNIT B. |
| 411 | IPI00015602 | MITOCHONDRIAL IMPORT RECEPTOR SUBUNIT TOM70. |
| 412 | IPI00413778 | FKBP1A PROTEIN. |
| 413 | IPI00219129 | RIBOSYLDIHYDRONICOTINAMIDE DEHYDROGENASE [QUINONE]. |
| 414 | IPI00984829 | PROTEIN. |
| 415 | IPI00170796 | ISOFORM 1 OF VACUOLAR PROTEIN SORTING-ASSOCIATED PROTEIN 29. |
| 416 | IPI00020672 | ISOFORM 1 OF DIPEPTIDYL PEPTIDASE 3. |
| 417 | IPI00019591 | CDNA FLJ55673, HIGHLY SIMILAR TO COMPLEMENT FACTOR B. |
| 418 | IPI00017551 | ISOFORM 1 OF REGUCALCIN. |
| 419 | IPI00019407 | STEROL-4-ALPHA-CARBOXYLATE 3-DEHYDROGENASE, DECARBOXYLATING. |
| 420 | IPI00217952 | ISOFORM 1 OF GLUCOSAMINE--FRUCTOSE-6-PHOSPHATE |
| | | AMINOTRANSFERASE [ISOMERIZING] 1. |
| 421 | IPI00030182 | GUANIDINOACETATE N-METHYLTRANSFERASE. |
| 422 | IPI00550644 | TETRATRICOPEPTIDE REPEAT PROTEIN 38. |
| 423 | IPI00328748 | CDNA FLJ77177, HIGHLY SIMILAR TO HOMO SAPIENS ARGININE-RICH, |
| | | MUTATED IN EARLY STAGE TUMORS (ARMET), MRNA. |
| 424 | IPI00291328 | NADH DEHYDROGENASE [UBIQUINONE] FLAVOPROTEIN 2, MITOCHONDRIAL. |
| 425 | IPI00305692 | THIOREDOXIN-LIKE PROTEIN 1. |
| 426 | IPI00004373 | MANNOSE-BINDING PROTEIN C. |
| 427 | IPI00006114 | PIGMENT EPITHELIUM-DERIVED FACTOR. |
| 428 | IPI00292858 | THYMIDINE PHOSPHORYLASE. |
| 429 | IPI00056369 | ISOFORM 1 OF GLYCINE N-ACYLTRANSFERASE-LIKE PROTEIN 1. |
| 430 | IPI00219913 | UBIQUITIN CARBOXYL-TERMINAL HYDROLASE 14. |
| 431 | IPI00297635 | ISOFORM 1 OF ACYL-COENZYME A SYNTHETASE ACSM3, MITOCHONDRIAL. |
| 432 | IPI00005614 | ISOFORM LONG OF SPECTRIN BETA CHAIN, BRAIN 1. |
| 433 | IPI00003519 | 116 KDA U5 SMALL NUCLEAR RIBONUCLEOPROTEIN COMPONENT. |
| 434 | IPI00001466 | ECHINODERM MICROTUBULE-ASSOCIATED PROTEIN-LIKE 4. |
| 435 | IPI00155601 | MACRO DOMAIN-CONTAINING PROTEIN 1. |
| 436 | IPI00105598 | PROTEASOME 26S NON-ATPASE SUBUNIT 11 VARIANT (FRAGMENT). |
| 437 | IPI00645307 | ISOFORM 1 OF ISOPENTENYL-DIPHOSPHATE DELTA-ISOMERASE 1. |
| 438 | IPI00012645 | ISOFORM 1 OF SPECTRIN BETA CHAIN, BRAIN 2. |
| 439 | IPI00009235 | TRANSLOCON-ASSOCIATED PROTEIN SUBUNIT GAMMA. |
| 440 | IPI00182469 | ISOFORM 1AB OF CATENIN DELTA-1. |
| 441 | IPI00412498 | UNCHARACTERIZED PROTEIN. |
| 442 | IPI00910745 | CDNA FLJ58224, HIGHLY SIMILAR TO CALPAIN-2 CATALYTIC SUBUNIT. |
| 443 | IPI00004860 | ISOFORM COMPLEXED OF ARGINYL-TRNA SYNTHETASE, CYTOPLASMIC. |
| 444 | IPI00029012 | EUKARYOTIC TRANSLATION INITIATION FACTOR 3 SUBUNIT A. |
| 445 | IPI00027341 | MACROPHAGE-CAPPING PROTEIN. |
| 446 | IPI00022432 | TRANSTHYRETIN. |
| 447 | IPI00376344 | ISOFORM 1 OF MYOSIN-IB. |
| 448 | IPI00219005 | PEPTIDYL-PROLYL CIS-TRANS ISOMERASE FKBP4. |
| 449 | IPI00293655 | ATP-DEPENDENT RNA HELICASE DDX1. |
| 450 | IPI00003933 | ISOFORM 1 OF HYDROXYACYLGLUTATHIONE HYDROLASE, MITOCHONDRIAL. |
| 451 | IPI00217420 | ISOFORM 2 OF HYDROXYACID-OXOACID TRANSHYDROGENASE, |
| | | MITOCHONDRIAL. |
| 452 | IPI00399318 | COATOMER SUBUNIT EPSILON ISOFORM B. |
| 453 | IPI00101652 | SELENOCYSTEINE LYASE. |
| 454 | IPI00925046 | GLUTAMINYL-TRNA SYNTHETASE. |
| 455 | IPI00220327 | KERATIN, TYPE II CYTOSKELETAL 1. |
| 456 | IPI00784029 | ISOFORM 1 OF OXIDOREDUCTASE HTATIP2. |
| 457 | IPI00296337 | ISOFORM 1 OF DNA-DEPENDENT PROTEIN KINASE CATALYTIC SUBUNIT. |
| 458 | IPI00029629 | E3 UBIQUITIN/ISG15 LIGASE TRIM25. |
| 459 | IPI00012268 | 26S PROTEASOME NON-ATPASE REGULATORY SUBUNIT 2. |
| 460 | IPI00301503 | ISOFORM 1 OF TRANSFORMER-2 PROTEIN HOMOLOG BETA. |
| 461 | IPI00023860 | NUCLEOSOME ASSEMBLY PROTEIN 1-LIKE 1. |
| 462 | IPI00008380 | SERINE/THREONINE-PROTEIN PHOSPHATASE 2A CATALYTIC SUBUNIT ALPHA |
| | | ISOFORM. |
| 463 | IPI00014808 | PLATELET-ACTIVATING FACTOR ACETYLHYDROLASE IB SUBUNIT GAMMA. |
| 464 | IPI00217253 | GTP CYCLOHYDROLASE 1 FEEDBACK REGULATORY PROTEIN. |
| 465 | IPI00305698 | VITAMIN K-DEPENDENT GAMMA-CARBOXYLASE. |
| 466 | IPI00219861 | ISOFORM 1 OF LOW MOLECULAR WEIGHT PHOSPHOTYROSINE PROTEIN |
| | | PHOSPHATASE. |
| 467 | IPI00017297 | MATRIN-3. |
| 468 | IPI00033022 | ISOFORM 1 OF DYNAMIN-2. |
| 469 | IPI00029739 | ISOFORM 1 OF COMPLEMENT FACTOR H. |
| 470 | IPI00001757 | ISOFORM 1 OF RNA-BINDING PROTEIN 8A. |
| 471 | IPI00216125 | ISOFORM 2 OF SIGNAL RECOGNITION PARTICLE 9 KDA PROTEIN. |
| 472 | IPI00021808 | HISTIDYL-TRNA SYNTHETASE, CYTOPLASMIC. |
| 473 | IPI00219512 | ISOFORM 2 OF UBIQUITIN CARBOXYL-TERMINAL HYDROLASE ISOZYME L5. |
| 474 | IPI00215948 | ISOFORM 1 OF CATENIN ALPHA-1. |
| 475 | IPI00479306 | ISOFORM 1 OF PROTEASOME SUBUNIT BETA TYPE-5. |
| 476 | IPI00018931 | VACUOLAR PROTEIN SORTING-ASSOCIATED PROTEIN 35. |
| 477 | IPI00021290 | ATP-CITRATE SYNTHASE. |
| 478 | IPI00385901 | ISOFORM 2 OF UBIQUINONE BIOSYNTHESIS PROTEIN COQ9, |
| | | MITOCHONDRIAL. |
| 479 | IPI00413674 | ISOFORM 1 OF PHYTANOYL-COA DIOXYGENASE DOMAIN-CONTAINING |
| | | PROTEIN 1. |
| 480 | IPI00293434 | SIGNAL RECOGNITION PARTICLE 14 KDA PROTEIN. |
| 481 | IPI00034308 | SARCOSINE DEHYDROGENASE, MITOCHONDRIAL. |
| 482 | IPI00295940 | CDNA FLJ55508, HIGHLY SIMILAR TO SAD1/UNC-84-LIKE PROTEIN 2. |
| 483 | IPI00383879 | ARYLACETAMIDE DEACETYLASE. |
| 484 | IPI00975644 | UNCHARACTERIZED PROTEIN. |
| 485 | IPI00297982 | EUKARYOTIC TRANSLATION INITIATION FACTOR 2 SUBUNIT 3. |
| 486 | IPI00008485 | CYTOPLASMIC ACONITATE HYDRATASE. |
| 487 | IPI00304596 | NON-POU DOMAIN-CONTAINING OCTAMER-BINDING PROTEIN. |
| 488 | IPI00005160 | ACTIN-RELATED PROTEIN 2/3 COMPLEX SUBUNIT 1B. |
| 489 | IPI00873506 | GUANINE AMINOHYDROLASE. |
| 490 | IPI00396435 | PUTATIVE PRE-MRNA-SPLICING FACTOR ATP-DEPENDENT RNA HELICASE |
| | | DHX15. |
| 491 | IPI00001699 | ISOFORM 1 OF APOPTOSIS-ASSOCIATED SPECK-LIKE PROTEIN CONTAINING A |
| | | CARD. |
| 492 | IPI00446769 | ISOFORM 2 OF 3-HYDROXYBUTYRATE DEHYDROGENASE TYPE 2. |
| 493 | IPI00745906 | SULFITE OXIDASE, MITOCHONDRIAL. |
| 494 | IPI00017451 | SPLICING FACTOR 3A SUBUNIT 1. |
| 495 | IPI00328753 | ISOFORM 1 OF KINECTIN. |
| 496 | IPI00942092 | ISOFORM 1 OF ADENYLOSUCCINATE LYASE. |
| 497 | IPI00333985 | ISOFORM 2 OF NODAL MODULATOR 2. |
| 498 | IPI00216298 | THIOREDOXIN. |
| 499 | IPI00295772 | LANOSTEROL 14-ALPHA DEMETHYLASE ISOFORM 1. |
| 500 | IPI00022143 | ISOFORM 1 OF EXTENDED SYNAPTOTAGMIN-1. |
| 501 | IPI00025815 | ISOFORM 2 OF TAR DNA-BINDING PROTEIN 43. |
| 502 | IPI00019927 | 26S PROTEASOME NON-ATPASE REGULATORY SUBUNIT 7. |
| 503 | IPI00013452 | BIFUNCTIONAL AMINOACYL-TRNA SYNTHETASE. |
| 504 | IPI00008240 | METHIONYL-TRNA SYNTHETASE, CYTOPLASMIC. |
| 505 | IPI00024284 | BASEMENT MEMBRANE-SPECIFIC HEPARAN SULFATE PROTEOGLYCAN CORE |
| | | PROTEIN. |
| 506 | IPI00220267 | ARGININOSUCCINATE LYASE. |
| 507 | IPI00395627 | ISOFORM 1 OF CALCYCLIN-BINDING PROTEIN. |
| 508 | IPI00550523 | ATLASTIN-3. |
| 509 | IPI00012535 | DNAJ HOMOLOG SUBFAMILY A MEMBER 1. |
| 510 | IPI00300074 | PHENYLALANYL-TRNA SYNTHETASE BETA CHAIN. |
| 511 | IPI00456969 | CYTOPLASMIC DYNEIN 1 HEAVY CHAIN 1 |
| 512 | IPI00022429 | ALPHA-1-ACID GLYCOPROTEIN 1. |
| 513 | IPI00009367 | SERINE--PYRUVATE AMINOTRANSFERASE. |
| 514 | IPI00220710 | ISOFORM 1 OF ACYL-COENZYME A THIOESTERASE 9, MITOCHONDRIAL. |
| 515 | IPI00433508 | CYTOCHROME P450 2D6 ISOFORM 2. |
| 516 | IPI00026105 | ISOFORM SCPX OF NON-SPECIFIC LIPID-TRANSFER PROTEIN. |
| 517 | IPI00477957 | ISOFORM 1 OF CITRATE LYASE SUBUNIT BETA-LIKE PROTEIN, |
| | | MITOCHONDRIAL. |
| 518 | IPI00293126 | TUBULIN-FOLDING COFACTOR B. |
| 519 | IPI00297477 | U2 SMALL NUCLEAR RIBONUCLEOPROTEIN A′. |
| 520 | IPI00024661 | PROTEIN TRANSPORT PROTEIN SEC24C. |
| 521 | IPI00297579 | CHROMOBOX PROTEIN HOMOLOG 3. |
| 522 | IPI00554742 | ISOFORM 2 OF APOPTOSIS INHIBITOR 5. |
| 523 | IPI00514301 | ISOFORM 1 OF PERIPHERAL PLASMA MEMBRANE PROTEIN CASK. |
| 524 | IPI00746165 | ISOFORM 1 OF WD REPEAT-CONTAINING PROTEIN 1 |
| 525 | IPI00220373 | INSULIN-DEGRADING ENZYME. |
| 526 | IPI00011250 | UBIQUITIN CARBOXYL-TERMINAL HYDROLASE ISOZYME L3. |
| 527 | IPI00011274 | ISOFORM 1 OF HETEROGENEOUS NUCLEAR RIBONUCLEOPROTEIN D-LIKE. |
| 528 | IPI00009253 | ALPHA-SOLUBLE NSF ATTACHMENT PROTEIN. |
| 529 | IPI00429191 | EUKARYOTIC PEPTIDE CHAIN RELEASE FACTOR SUBUNIT 1. |
| 530 | IPI00186704 | N-ACETYLGALACTOSAMINE KINASE ISOFORM 2. |
| 531 | IPI00917623 | UNCHARACTERIZED PROTEIN. |
| 532 | IPI00043911 | PROBABLE IMIDAZOLONEPROPIONASE. |
| 533 | IPI00000816 | ISOFORM 1 OF 14-3-3 PROTEIN EPSILON. |
| 534 | IPI00011604 | GLYCINE CLEAVAGE SYSTEM H PROTEIN, MITOCHONDRIAL. |
| 535 | IPI00292020 | SPERMIDINE SYNTHASE. |
| 536 | IPI00061525 | GLUCOSAMINE 6-PHOSPHATE N-ACETYLTRANSFERASE. |
| 537 | IPI00880007 | MICROTUBULE-ASSOCIATED PROTEIN. |
| 538 | IPI00032311 | LIPOPOLYSACCHARIDE-BINDING PROTEIN. |
| 539 | IPI00022201 | L-SERINE DEHYDRATASE/L-THREONINE DEAMINASE. |
| 540 | IPI00300371 | ISOFORM 1 OF SPLICING FACTOR 3B SUBUNIT 3. |
| 541 | IPI00013933 | ISOFORM DPI OF DESMOPLAKIN. |
| 542 | IPI00221224 | AMINOPEPTIDASE N. |
| 543 | IPI00924544 | 35 KDA PROTEIN. |
| 544 | IPI00299149 | SMALL UBIQUITIN-RELATED MODIFIER 2. |
| 545 | IPI00219111 | TRANSLOCATING CHAIN-ASSOCIATED MEMBRANE PROTEIN 1. |
| 546 | IPI00221178 | ISOFORM 2 OF TUMOR PROTEIN D54. |
| 547 | IPI00009923 | ISOFORM 1 OF PROLYL 4-HYDROXYLASE SUBUNIT ALPHA-1. |
| 548 | IPI00328319 | ISOFORM 1 OF HISTONE-BINDING PROTEIN RBBP4. |
| 549 | IPI00006167 | PROTEIN PHOSPHATASE 1G. |
| 550 | IPI00106509 | ISOFORM 4 OF HETEROGENEOUS NUCLEAR RIBONUCLEOPROTEIN A/B. |
| 551 | IPI00024976 | MITOCHONDRIAL IMPORT RECEPTOR SUBUNIT TOM22 HOMOLOG. |
| 552 | IPI00291643 | SPRY DOMAIN-CONTAINING PROTEIN 4. |
| 553 | IPI00374657 | ISOFORM 2 OF VESICLE-ASSOCIATED MEMBRANE PROTEIN-ASSOCIATED |
| | | PROTEIN A. |
| 554 | IPI00011916 | AMINOACYL TRNA SYNTHASE COMPLEX-INTERACTING MULTIFUNCTIONAL |
| | | PROTEIN 2. |
| 555 | IPI00294578 | ISOFORM 1 OF PROTEIN-GLUTAMINE GAMMA-GLUTAMYLTRANSFERASE 2. |
| 556 | IPI00000015 | SERINE/ARGININE-RICH SPLICING FACTOR 4. |
| 557 | IPI00306382 | ISOFORM 1 OF SECRETORY CARRIER-ASSOCIATED MEMBRANE PROTEIN 3. |
| 558 | IPI00179057 | ISOFORM 2 OF CULLIN-4B. |
| 559 | IPI00022830 | ISOFORM 2 OF NSFL1 COFACTOR P47. |
| 560 | IPI00008454 | DNAJ HOMOLOG SUBFAMILY B MEMBER 11. |
| 561 | IPI00064328 | PROTEIN ARGININE N-METHYLTRANSFERASE 5 ISOFORM B. |
| 562 | IPI00032460 | U6 SNRNA-ASSOCIATED SM-LIKE PROTEIN LSM2. |
| 563 | IPI00013495 | ISOFORM 2 OF ATP-BINDING CASSETTE SUB-FAMILY F MEMBER 1. |
| 564 | IPI00165230 | ISOFORM 1 OF DAZ-ASSOCIATED PROTEIN 1. |
| 565 | IPI00294879 | RAN GTPASE-ACTIVATING PROTEIN 1. |
| 566 | IPI00479997 | ISOFORM 1 OF STATHMIN. |
| 567 | IPI00163230 | COP9 SIGNALOSOME COMPLEX SUBUNIT 6. |
| 568 | IPI00013174 | ISOFORM 1 OF RNA-BINDING PROTEIN 14. |
| 569 | IPI00374563 | AGRIN. |
| 570 | IPI00306960 | ASPARAGINYL-TRNA SYNTHETASE, CYTOPLASMIC. |
| 571 | IPI00021187 | ISOFORM 1 OF RUVB-LIKE 1. |
| 572 | IPI00009943 | TUMOR PROTEIN, TRANSLATIONALLY-CONTROLLED 1. |
| 573 | IPI00438229 | ISOFORM 1 OF TRANSCRIPTION INTERMEDIARY FACTOR 1-BETA. |
| 574 | IPI00004457 | MEMBRANE PRIMARY AMINE OXIDASE. |
| 575 | IPI00022462 | TRANSFERRIN RECEPTOR PROTEIN 1. |
| 576 | IPI00009704 | PROBABLE PROLINE DEHYDROGENASE 2. |
| 577 | IPI00024417 | HUNTINGTIN-INTERACTING PROTEIN 1-RELATED PROTEIN. |
| 578 | IPI00414860 | 60S RIBOSOMAL PROTEIN L37A. |
| 579 | IPI00029601 | SRC SUBSTRATE CORTACTIN. |
| 580 | IPI00015736 | ISOFORM 1 OF UBIQUITIN-LIKE MODIFIER-ACTIVATING ENZYME 5. |
| 581 | IPI00006721 | ISOFORM 1 OF DYNAMIN-LIKE 120 KDA PROTEIN, MITOCHONDRIAL. |
| 582 | IPI00295851 | COATOMER SUBUNIT BETA. |
| 583 | IPI00217236 | TUBULIN-SPECIFIC CHAPERONE A. |
| 584 | IPI00045051 | TRANSCRIPTIONAL ACTIVATOR PROTEIN PUR-BETA. |
| 585 | IPI00006207 | ISOFORM 2 OF LEUCINE-RICH REPEAT FLIGHTLESS-INTERACTING PROTEIN 1. |
| 586 | IPI00021695 | ISOFORM D OF PLASMA MEMBRANE CALCIUM-TRANSPORTING ATPASE 1. |
| 587 | IPI00418497 | ISOFORM 2 OF MITOCHONDRIAL IMPORT INNER MEMBRANE TRANSLOCASE |
| | | SUBUNIT TIM50. |
| 588 | IPI00016287 | THREONINE SYNTHASE-LIKE 1. |
| 589 | IPI00294536 | CDNA FLJ51909, HIGHLY SIMILAR TO SERINE-THREONINE KINASE RECEPTOR- |
| | | ASSOCIATEDPROTEIN. |
| 590 | IPI00013070 | ISOFORM 1 OF HETEROGENEOUS NUCLEAR RIBONUCLEOPROTEIN U-LIKE |
| | | PROTEIN 1. |
| 591 | IPI00619898 | NQO1 PROTEIN (FRAGMENT). |
| 592 | IPI00008867 | GLYCOGEN [STARCH] SYNTHASE, LIVER. |
| 593 | IPI00021466 | ISOFORM 1 OF POLYADENYLATE-BINDING PROTEIN-INTERACTING PROTEIN 1. |
| 594 | IPI00000581 | CDNA FLJ56307, HIGHLY SIMILAR TO UBIQUITIN THIOESTERASE PROTEIN |
| | | OTUB1. |
| 595 | IPI00018120 | 28S RIBOSOMAL PROTEIN S29, MITOCHONDRIAL. |
| 596 | IPI00554590 | ISOFORM 1 OF RAB3 GTPASE-ACTIVATING PROTEIN NON-CATALYTIC |
| | | SUBUNIT. |
| 597 | IPI00220528 | SMALL NUCLEAR RIBONUCLEOPROTEIN F. |
| 598 | IPI00978402 | UNCHARACTERIZED PROTEIN. |
| 599 | IPI00025057 | ISOFORM 2 OF DOUBLE-STRANDED RNA-SPECIFIC ADENOSINE DEAMINASE. |
| 600 | IPI00910005 | CDNA FLJ59832, MODERATELY SIMILAR TO PROSTAGLANDIN E SYNTHASE 3. |
| 601 | IPI00069750 | ISOFORM 1 OF POLY(U)-BINDING-SPLICING FACTOR PUF60. |
| 602 | IPI00004928 | ISOFORM 1 OF EGL NINE HOMOLOG 1. |
| 603 | IPI00013925 | GALACTOSE-1-PHOSPHATE URIDYLYLTRANSFERASE. |
| 604 | IPI00000663 | ISOFORM MITOCHONDRIAL OF MALONYL-COA DECARBOXYLASE, |
| | | MITOCHONDRIAL. |
| 605 | IPI00152441 | ISOFORM 1 OF MINOR HISTOCOMPATIBILITY ANTIGEN H13. |
| 606 | IPI00008982 | ISOFORM LONG OF DELTA-1-PYRROLINE-5-CARBOXYLATE SYNTHASE. |
| 607 | IPI00163505 | ISOFORM 1 OF RNA-BINDING PROTEIN 39. |
| 608 | IPI00009659 | REGULATION OF NUCLEAR PRE-MRNA DOMAIN-CONTAINING PROTEIN 1B. |
| 609 | IPI00103994 | LEUCYL-TRNA SYNTHETASE, CYTOPLASMIC. |
| 610 | IPI00220993 | ISOFORM CNPI OF 2′,3′-CYCLIC-NUCLEOTIDE 3′-PHOSPHODIESTERASE. |
| 611 | IPI00219156 | 60S RIBOSOMAL PROTEIN L30. |
| 612 | IPI00004968 | PRE-MRNA-PROCESSING FACTOR 19. |
| 613 | IPI00032140 | SERPIN H1. |
| 614 | IPI00293088 | LYSOSOMAL ALPHA-GLUCOSIDASE. |
| 615 | IPI00843975 | EZRIN. |
| 616 | IPI00290452 | TRANSMEMBRANE BAX INHIBITOR MOTIF-CONTAINING PROTEIN 1. |
| 617 | IPI00745502 | 26S PROTEASE REGULATORY SUBUNIT 8 ISOFORM 2. |
| 618 | IPI00298860 | CDNA FLJ78440, HIGHLY SIMILAR TO HUMAN LACTOFERRIN. |
| 619 | IPI00032003 | EMERIN. |
| 620 | IPI00024825 | ISOFORM A OF PROTEOGLYCAN 4. |
| 621 | IPI00006181 | EUKARYOTIC TRANSLATION INITIATION FACTOR 3 SUBUNIT D. |
| 622 | IPI00025831 | CYTOCHROME P450 3A5. |
| 623 | IPI00019907 | GLYPICAN-3. |
| 624 | IPI00166092 | N-ACETYLGLUTAMATE SYNTHASE, MITOCHONDRIAL. |
| 625 | IPI00163849 | CDNA FLJ60624, HIGHLY SIMILAR TO EPIDERMAL GROWTH FACTOR |
| | | RECEPTOR SUBSTRATE 15-LIKE 1. |
| 626 | IPI00298281 | LAMININ SUBUNIT GAMMA-1. |
| 627 | IPI00018350 | DNA REPLICATION LICENSING FACTOR MCM5. |
| 628 | IPI00025100 | 2-OXOISOVALERATE DEHYDROGENASE SUBUNIT ALPHA, MITOCHONDRIAL. |
| 629 | IPI00419903 | ISOFORM 1 OF PUTATIVE L-ASPARTATE DEHYDROGENASE. |
| 630 | IPI00183208 | ISOFORM 1 OF F-BOX ONLY PROTEIN 22. |
| 631 | IPI00014149 | TETRATRICOPEPTIDE REPEAT PROTEIN 35. |
| 632 | IPI00329633 | THREONYL-TRNA SYNTHETASE, CYTOPLASMIC. |
| 633 | IPI00644231 | ISOFORM 1 OF CYTOPLASMIC FMR1-INTERACTING PROTEIN 1. |
| 634 | IPI00002147 | CHITINASE-3-LIKE PROTEIN 1. |
| 635 | IPI00216008 | ISOFORM LONG OF GLUCOSE-6-PHOSPHATE 1-DEHYDROGENASE. |
| 636 | IPI00003309 | DNA-DIRECTED RNA POLYMERASES I, II, AND III SUBUNIT RPABC3. |
| 637 | IPI00178798 | ISOFORM 2 OF PROTEIN TRANSPORT PROTEIN SEC24A. |
| 638 | IPI00176469 | ISOFORM 1 OF CHAPERONE ACTIVITY OF BC1 COMPLEX-LIKE, |
| | | MITOCHONDRIAL. |
| 639 | IPI00019848 | ISOFORM 1 OF HOST CELL FACTOR 1. |
| 640 | IPI00005794 | UNCHARACTERIZED PROTEIN. |
| 641 | IPI00008613 | ISOFORM 1 OF INTERFERON-INDUCED 35 KDA PROTEIN. |
| 642 | IPI00012970 | ISOFORM 1 OF SERINE/THREONINE-PROTEIN PHOSPHATASE 6 CATALYTIC |
| | | SUBUNIT. |
| 643 | IPI00023234 | SUMO-ACTIVATING ENZYME SUBUNIT 2. |
| 644 | IPI00789155 | CALUMENIN ISOFORM C PRECUROSR. |
| 645 | IPI00298961 | EXPORTIN-1. |
| 646 | IPI00032881 | 28S RIBOSOMAL PROTEIN S23, MITOCHONDRIAL. |
| 647 | IPI00013214 | CDNA FLJ55599, HIGHLY SIMILAR TO DNA REPLICATION LICENSING FACTOR |
| | | MCM3. |
| 648 | IPI00791534 | SOLUTE CARRIER FAMILY 4, ANION EXCHANGER, MEMBER 1. |
| 649 | IPI00006196 | ISOFORM 2 OF NUCLEAR MITOTIC APPARATUS PROTEIN 1. |
| 650 | IPI00025039 | RRNA 2′-O-METHYLTRANSFERASE FIBRILLARIN. |
| 651 | IPI00007166 | IMMEDIATE EARLY RESPONSE 3-INTERACTING PROTEIN 1. |
| 652 | IPI00218925 | ISOFORM 1 OF PEROXISOMAL MEMBRANE PROTEIN 4. |
| 653 | IPI00215687 | ISOFORM 3 OF GLUTAMINASE KIDNEY ISOFORM, MITOCHONDRIAL. |
| 654 | IPI00018632 | CDNA FLJ12528 FIS, CLONE NT2RM4000155, MODERATELY SIMILAR TO |
| | | THREONYL- TRNA SYNTHETASE, CYTOPLASMIC. |
| 655 | IPI00003870 | PUTATIVE ATP-DEPENDENT CLP PROTEASE PROTEOLYTIC SUBUNIT, |
| | | MITOCHONDRIAL. |
| 656 | IPI00646954 | 89 KDA PROTEIN. |
| 657 | IPI00292695 | LONG-CHAIN SPECIFIC ACYL-COA DEHYDROGENASE, MITOCHONDRIAL. |
| 658 | IPI00016568 | ADENYLATE KINASE ISOENZYME 4, MITOCHONDRIAL. |
| 659 | IPI00021570 | ISOFORM 1 OF ENDOTHELIAL DIFFERENTIATION-RELATED FACTOR 1. |
| 660 | IPI01016029 | ISOFORM 2 OF MITOCHONDRIAL PEPTIDE METHIONINE SULFOXIDE |
| | | REDUCTASE. |
| 661 | IPI00022095 | ISOFORM RF1/RF2 OF RETROTRANSPOSON-DERIVED PROTEIN PEG10. |
| 662 | IPI00022078 | PROTEIN NDRG1. |
| 663 | IPI00013774 | HISTONE DEACETYLASE 1. |
| 664 | IPI00013079 | EMILIN-1. |
| 665 | IPI00006722 | ISOFORM 1 OF PEROXISOMAL MEMBRANE PROTEIN PEX16. |
| 666 | IPI00168262 | PROCOLLAGEN GALACTOSYLTRANSFERASE 1. |
| 667 | IPI00031556 | ISOFORM 1 OF SPLICING FACTOR U2AF 65 KDA SUBUNIT. |
| 668 | IPI00103525 | ISOFORM 1 OF PARASPECKLE COMPONENT 1. |
| 669 | IPI00478961 | ISOFORM 1 OF FGGY CARBOHYDRATE KINASE DOMAIN-CONTAINING |
| | | PROTEIN. |
| 670 | IPI00028908 | ISOFORM 1 OF NIDOGEN-2. |
| 671 | IPI00982620 | CDNA FLJ61765, HIGHLY SIMILAR TO 4-TRIMETHYLAMINOBUTYRALDEHYDE |
| | | DEHYDROGENASE. |
| 672 | IPI00472604 | UNCHARACTERIZED PROTEIN. |
| 673 | IPI00414612 | ISOFORM 1 OF PUTATIVE HEXOKINASE HKDC1. |
| 674 | IPI00412713 | SORTING AND ASSEMBLY MACHINERY COMPONENT 50 HOMOLOG. |
| 675 | IPI00022744 | ISOFORM 1 OF EXPORTIN-2. |
| 676 | IPI00297550 | COAGULATION FACTOR XIII A CHAIN. |
| 677 | IPI00552419 | PROPIONYL-COA CARBOXYLASE ALPHA CHAIN, MITOCHONDRIAL ISOFORM C |
| | | PRECURSOR. |
| 678 | IPI00010154 | RAB GDP DISSOCIATION INHIBITOR ALPHA. |
| 679 | IPI00219673 | ISOFORM 1 OF GLUTATHIONE S-TRANSFERASE KAPPA 1. |
| 680 | IPI00027223 | ISOCITRATE DEHYDROGENASE [NADP] CYTOPLASMIC. |
| 681 | IPI00470674 | NADH-CYTOCHROME B5 REDUCTASE 1. |
| 682 | IPI00027192 | CDNA, FLJ79184, HIGHLY SIMILAR TO PROCOLLAGEN-LYSINE, 2- |
| | | OXOGLUTARATE 5-DIOXYGENASE 1. |
| 683 | IPI00003836 | UDP-GLUCURONOSYLTRANSFERASE 2B10. |
| 684 | IPI00377161 | ISOFORM 2 OF 3-HYDROXYISOBUTYRYL-COA HYDROLASE, MITOCHONDRIAL. |
| 685 | IPI00465431 | GALECTIN-3. |
| 686 | IPI00180675 | TUBULIN ALPHA-1A CHAIN. |
| 687 | IPI00013679 | 27 KDA PROTEIN. |
| 688 | IPI00025366 | CITRATE SYNTHASE, MITOCHONDRIAL. |
| 689 | IPI00329572 | PROTEIN KINASE C AND CASEIN KINASE SUBSTRATE IN NEURONS 3, ISOFORM |
| | | CRA_B. |
| 690 | IPI00465294 | CELL DIVISION CYCLE 5-LIKE PROTEIN. |
| 691 | IPI00029997 | 6-PHOSPHOGLUCONOLACTONASE. |
| 692 | IPI00221092 | 40S RIBOSOMAL PROTEIN S16. |
| 693 | IPI00479186 | ISOFORM M2 OF PYRUVATE KINASE ISOZYMES M1/M2. |
| 694 | IPI00006451 | VESICLE-FUSING ATPASE. |
| 695 | IPI00219018 | GLYCERALDEHYDE-3-PHOSPHATE DEHYDROGENASE. |
| 696 | IPI00329444 | ACYL-COENZYME A SYNTHETASE ACSM2B, MITOCHONDRIAL. |
| 697 | IPI00411937 | NUCLEOLAR PROTEIN 56. |
| 698 | IPI00026272 | HISTONE H2A TYPE 1-B/E. |
| 699 | IPI00007797 | FATTY ACID-BINDING PROTEIN, EPIDERMAL. |
| 700 | IPI00218606 | 40S RIBOSOMAL PROTEIN S23. |
| 701 | IPI00014053 | ISOFORM 1 OF MITOCHONDRIAL IMPORT RECEPTOR SUBUNIT TOM40 |
| | | HOMOLOG. |
| 702 | IPI00007133 | ISOFORM 3 OF CORDON-BLEU PROTEIN-LIKE 1. |
| 703 | IPI00011268 | CDNA FLJ77422, HIGHLY SIMILAR TO HOMO SAPIENS RNA BINDING PROTEIN, |
| | | AUTOANTIGENIC (HNRNP-ASSOCIATED WITH LETHAL YELLOW HOMOLOG |
| | | (MOUSE)), TRANSCRIPT VARIANT 1, MRNA (FRAGMENT). |
| 704 | IPI00026314 | ISOFORM 1 OF GELSOLIN. |
| 705 | IPI00220994 | CORE HISTONE MACRO-H2A.2 |
| 706 | IPI00299456 | FRUCTOSE-1,6-BISPHOSPHATASE ISOZYME 2. |
| 707 | IPI00016112 | ISOFORM 1 OF PEROXIDASIN HOMOLOG. |
| 708 | IPI00289758 | CALPAIN-2 CATALYTIC SUBUNIT. |
| 709 | IPI00013957 | MITOCHONDRIAL CARNITINE/ACYLCARNITINE CARRIER PROTEIN. |
| 710 | IPI00030275 | HEAT SHOCK PROTEIN 75 KDA, MITOCHONDRIAL. |
| 711 | IPI00003905 | SOLUTE CARRIER FAMILY 2, FACILITATED GLUCOSE TRANSPORTER MEMBER |
| | | 2. |
| 712 | IPI00013877 | ISOFORM 1 OF HETEROGENEOUS NUCLEAR RIBONUCLEOPROTEIN H3. |
| 713 | IPI00219365 | MOESIN. |
| 714 | IPI00215911 | DNA-(APURINIC OR APYRIMIDINIC SITE) LYASE. |
| 715 | IPI00293307 | PERILIPIN-2. |
| 716 | IPI00023086 | 39S RIBOSOMAL PROTEIN L15, MITOCHONDRIAL. |
| 717 | IPI00013809 | ISOFORM 1 OF MALEYLACETOACETATE ISOMERASE. |
| 718 | IPI00479145 | KERATIN, TYPE I CYTOSKELETAL 19. |
| 719 | IPI00007221 | PLASMA SERINE PROTEASE INHIBITOR. |
| 720 | IPI00028564 | INTERFERON-INDUCED GUANYLATE-BINDING PROTEIN 1. |
| 721 | IPI00012011 | COFILIN-1. |
| 722 | IPI00852768 | UNCHARACTERIZED PROTEIN. |
| 723 | IPI00007675 | CYTOPLASMIC DYNEIN 1 LIGHT INTERMEDIATE CHAIN 1. |
| 724 | IPI01008914 | EUKARYOTIC INITIATION FACTOR 4A-I ISOFORM 2. |
| 725 | IPI00019568 | PROTHROMBIN (FRAGMENT). |
| 726 | IPI00012048 | ISOFORM 1 OF NUCLEOSIDE DIPHOSPHATE KINASE A. |
| 727 | IPI00033349 | PROLACTIN REGULATORY ELEMENT-BINDING PROTEIN. |
| 728 | IPI00735641 | ISOFORM 1 OF 60 KDA LYSOPHOSPHOLIPASE. |
| 729 | IPI00644127 | ISOLEUCYL-TRNA SYNTHETASE, CYTOPLASMIC. |
| 730 | IPI00257508 | DIHYDROPYRIMIDINASE-RELATED PROTEIN 2. |
| 731 | IPI00000105 | MAJOR VAULT PROTEIN. |
| 732 | IPI00444262 | CDNA FLJ45706 FIS, CLONE FEBRA2028457, HIGHLY SIMILAR TO NUCLEOLIN. |
| 733 | IPI00024425 | UNCHARACTERIZED PROTEIN. |
| 734 | IPI00021263 | 14-3-3 PROTEIN ZETA/DELTA. |
| 735 | IPI00039626 | ISOFORM D OF CONSTITUTIVE COACTIVATOR OF PPAR-GAMMA-LIKE |
| | | PROTEIN 1. |
| 736 | IPI00014898 | ISOFORM 1 OF PLECTIN. |
| 737 | IPI00103483 | NEGATIVE ELONGATION FACTOR B. |
| 738 | IPI00401264 | ENDOPLASMIC RETICULUM RESIDENT PROTEIN 44. |
| 739 | IPI00218803 | ISOFORM B OF FIBULIN-1. |
| 740 | IPI00333619 | ISOFORM 1 OF FATTY ALDEHYDE DEHYDROGENASE. |
| 741 | IPI00884105 | LYSOSOME-ASSOCIATED MEMBRANE GLYCOPROTEIN 1. |
| 742 | IPI00026781 | FATTY ACID SYNTHASE. |
| 743 | IPI01014863 | ACETYL-COA ACETYLTRANSFERASE, CYTOSOLIC. |
| 744 | IPI00375577 | TRANSMEMBRANE PROTEIN 65. |
| 745 | IPI00062206 | UNCHARACTERIZED PROTEIN. |
| 746 | IPI00021812 | NEUROBLAST DIFFERENTIATION-ASSOCIATED PROTEIN AHNAK. |
| 747 | IPI00022002 | CDNA FLJ54536, HIGHLY SIMILAR TO MITOCHONDRIAL 28S RIBOSOMAL |
| | | PROTEIN S27. |
| 748 | IPI00465085 | ISOFORM 1 OF NICOTINATE PHOSPHORIBOSYLTRANSFERASE. |
| 749 | IPI00019599 | ISOFORM 1 OF UBIQUITIN-CONJUGATING ENZYME E2 VARIANT 1. |
| 750 | IPI00375631 | UBIQUITIN-LIKE PROTEIN ISG15. |
| 751 | IPI00032304 | PLASTIN-1. |
| 752 | IPI00023748 | NASCENT POLYPEPTIDE-ASSOCIATED COMPLEX SUBUNIT ALPHA. |
| 753 | IPI00018342 | ADENYLATE KINASE ISOENZYME 1. |
| 754 | IPI00020906 | INOSITOL MONOPHOSPHATASE 1. |
| 755 | IPI00005809 | SERUM DEPRIVATION-RESPONSE PROTEIN. |
| 756 | IPI00448751 | ISOFORM 3 OF SHOOTIN-1. |
| 757 | IPI00006034 | CYSTEINE-RICH PROTEIN 2. |
| 758 | IPI00042580 | ISOFORM 1 OF APOLIPOPROTEIN O. |
| 759 | IPI00221234 | ISOFORM 1 OF ALPHA-AMINOADIPIC SEMIALDEHYDE DEHYDROGENASE. |
| 760 | IPI00784614 | SEPTIN-9 ISOFORM A. |
| 761 | IPI00022254 | ISOFORM 1 OF UBIQUITIN-LIKE-CONJUGATING ENZYME ATG3. |
| 762 | IPI00553177 | ISOFORM 1 OF ALPHA-1-ANTITRYPSIN. |
| 763 | IPI00658013 | NUCLEOPHOSMIN ISOFORM 3. |
| 764 | IPI00219518 | ADP-RIBOSYLATION FACTOR-LIKE PROTEIN 1. |
| 765 | IPI00013297 | 28 KDA HEAT- AND ACID-STABLE PHOSPHOPROTEIN. |
| 766 | IPI00009747 | LANOSTEROL SYNTHASE. |
| 767 | IPI00030229 | UNCHARACTERIZED PROTEIN. |
| 768 | IPI00218591 | ISOFORM ASF-2 OF SERINE/ARGININE-RICH SPLICING FACTOR 1. |
| 769 | IPI00031091 | EF-HAND DOMAIN-CONTAINING PROTEIN D1. |
| 770 | IPI00021338 | DIHYDROLIPOYLLYSINE-RESIDUE ACETYLTRANSFERASE COMPONENT OF |
| | | PYRUVATE DEHYDROGENASE COMPLEX, MITOCHONDRIAL. |
| 771 | IPI00215780 | 40S RIBOSOMAL PROTEIN S19. |
| 772 | IPI00099595 | 17-BETA-HYDROXYSTEROID DEHYDROGENASE TYPE 6. |
| 773 | IPI00017342 | RHO-RELATED GTP-BINDING PROTEIN RHOG. |
| 774 | IPI00643527 | ISOFORM 2 OF PHOSPHOINOSITIDE 3-KINASE ADAPTER PROTEIN 1. |
| 775 | IPI00916765 | CDNA FLJ53959, HIGHLY SIMILAR TO MITOCHONDRIAL INNER MEMBRANE |
| | | PROTEIN. |
| 776 | IPI00411639 | LAMININ RECEPTOR-LIKE PROTEIN LAMRL5. |
| 777 | IPI00015953 | ISOFORM 1 OF NUCLEOLAR RNA HELICASE 2. |
| 778 | IPI00017855 | ACONITATE HYDRATASE, MITOCHONDRIAL. |
| 779 | IPI00004902 | ISOFORM 1 OF ELECTRON TRANSFER FLAVOPROTEIN SUBUNIT BETA. |
| 780 | IPI00554811 | ACTIN-RELATED PROTEIN 2/3 COMPLEX SUBUNIT 4. |
| 781 | IPI00011075 | ALANINE--GLYOXYLATE AMINOTRANSFERASE 2, MITOCHONDRIAL. |
| 782 | IPI00029307 | HISTAMINE N-METHYLTRANSFERASE ISOFORM 2. |
| 783 | IPI00019755 | GLUTATHIONE S-TRANSFERASE OMEGA-1. |
| 784 | IPI00002370 | LEUKOTRIENE-B(4) OMEGA-HYDROXYLASE 2. |
| 785 | IPI00418262 | FRUCTOSE-BISPHOSPHATE ALDOLASE. |
| 786 | IPI00028091 | ACTIN-RELATED PROTEIN 3. |
| 787 | IPI00021891 | ISOFORM GAMMA-B OF FIBRINOGEN GAMMA CHAIN. |
| 788 | IPI00465038 | ISOFORM 2 OF FIBULIN-2. |
| 789 | IPI00031420 | UDP-GLUCOSE 6-DEHYDROGENASE. |
| 790 | IPI00003925 | ISOFORM 1 OF PYRUVATE DEHYDROGENASE El COMPONENT SUBUNIT |
| | | BETA, MITOCHONDRIAL. |
| 791 | IPI00418471 | VIMENTIN. |
| 792 | IPI00029019 | ISOFORM 2 OF UBIQUITIN-ASSOCIATED PROTEIN 2-LIKE. |
| 793 | IPI00641582 | BAG FAMILY MOLECULAR CHAPERONE REGULATOR 3. |
| 794 | IPI00020436 | RAS-RELATED PROTEIN RAB-11B. |
| 795 | IPI00096066 | SUCCINYL-COA LIGASE [GDP-FORMING] SUBUNIT BETA, MITOCHONDRIAL. |
| 796 | IPI00329495 | ISOFORM 1 OF ACTIN-BINDING LIM PROTEIN 1. |
| 797 | IPI00008494 | INTERCELLULAR ADHESION MOLECULE 1. |
| 798 | IPI00889534 | CARBAMOYL-PHOSPHATE SYNTHASE [AMMONIA], MITOCHONDRIAL |
| | | ISOFORM A PRECURSOR. |
| 799 | IPI00294178 | ISOFORM 1 OF SERINE/THREONINE-PROTEIN PHOSPHATASE 2A 65 KDA |
| | | REGULATORY SUBUNIT A BETA ISOFORM. |
| 800 | IPI00168603 | CHOLINE DEHYDROGENASE, MITOCHONDRIAL. |
| 801 | IPI00002491 | ISOFORM 9 OF SORBIN AND SH3 DOMAIN-CONTAINING PROTEIN 1. |
| 802 | IPI00008530 | 60S ACIDIC RIBOSOMAL PROTEIN P0. |
| 803 | IPI00038356 | ISOFORM 3 OF ARGINASE-1. |
| 804 | IPI00413344 | COFILIN-2. |
| 805 | IPI00640703 | EXPORTIN-5. |
| 806 | IPI00008274 | ISOFORM 1 OF ADENYLYL CYCLASE-ASSOCIATED PROTEIN 1. |
| 807 | IPI00293665 | KERATIN, TYPE II CYTOSKELETAL 6B. |
| 808 | IPI00032179 | ANTITHROMBIN-III. |
| 809 | IPI00306516 | MITOCHONDRIAL IMPORT INNER MEMBRANE TRANSLOCASE SUBUNIT |
| | | TIM44. |
| 810 | IPI00033494 | MYOSIN REGULATORY LIGHT CHAIN 12B. |
| 811 | IPI00018260 | ARMADILLO REPEAT-CONTAINING PROTEIN 1. |
| 812 | IPI00059366 | ISOFORM 3 OF CORE HISTONE MACRO-H2A.1 |
| 813 | IPI00384495 | ISOFORM 3 OF E3 UBIQUITIN-PROTEIN LIGASE NEDD4. |
| 814 | IPI00306369 | TRNA (CYTOSINE(34)-C(5))-METHYLTRANSFERASE. |
| 815 | IPI00291578 | ISOFORM 1 OF PHOSPHORIBOSYL PYROPHOSPHATE SYNTHASE-ASSOCIATED |
| | | PROTEIN 1. |
| 816 | IPI00026185 | ISOFORM 1 OF F-ACTIN-CAPPING PROTEIN SUBUNIT BETA. |
| 817 | IPI00181893 | ISOFORM 4 OF PHOSPHORYLASE B KINASE REGULATORY SUBUNIT BETA. |
| 818 | IPI00297261 | TYROSINE-PROTEIN PHOSPHATASE NON-RECEPTOR TYPE 1. |
| 819 | IPI00029772 | DIHYDROPYRIMIDINE DEHYDROGENASE [NADP+]. |
| 820 | IPI00027497 | GLUCOSE-6-PHOSPHATE ISOMERASE. |
| 821 | IPI00026602 | HLA CLASS I HISTOCOMPATIBILITY ANTIGEN, B-41 ALPHA CHAIN. |
| 822 | IPI00384401 | MYOSIN-REACTIVE IMMUNOGLOBULIN KAPPA CHAIN VARIABLE REGION |
| | | (FRAGMENT). |
| 823 | IPI00065063 | DEHYDROGENASE/REDUCTASE SDR FAMILY MEMBER 1. |
| 824 | IPI00470470 | ISOFORM 2 OF PROBABLE ARYLFORMAMIDASE. |
| 825 | IPI00294186 | ISOFORM 1 OF SERINE BETA-LACTAMASE-LIKE PROTEIN LACTB, |
| | | MITOCHONDRIAL. |
| 826 | IPI00018783 | INOSINE TRIPHOSPHATE PYROPHOSPHATASE. |
| 827 | IPI00100775 | ISOFORM 1 OF UPF0366 PROTEIN C11ORF67. |
| 828 | IPI00967700 | UNCHARACTERIZED PROTEIN. |
| 829 | IPI00019353 | ISOFORM 1 OF ACYLGLYCEROL KINASE, MITOCHONDRIAL. |
| 830 | IPI00010274 | TPSAB1 PROTEIN. |
| 831 | IPI00024462 | DIHYDROOROTATE DEHYDROGENASE (QUINONE), MITOCHONDRIAL. |
| 832 | IPI00783987 | COMPLEMENT C3 (FRAGMENT). |
| 833 | IPI00005563 | ISOFORM 1 OF TUBULOINTERSTITIAL NEPHRITIS ANTIGEN-LIKE. |
| 834 | IPI00304612 | 60S RIBOSOMAL PROTEIN L13A. |
| 835 | IPI00289334 | ISOFORM 1 OF FILAMIN-B. |
| 836 | IPI00037283 | ISOFORM 5 OF DYNAMIN-1-LIKE PROTEIN. |
| 837 | IPI00924816 | MYOTROPHIN. |
| 838 | IPI00218319 | ISOFORM 2 OF TROPOMYOSIN ALPHA-3 CHAIN. |
| 839 | IPI00014850 | ASTROCYTIC PHOSPHOPROTEIN PEA-15. |
| 840 | IPI00221088 | 40S RIBOSOMAL PROTEIN S9. |
| 841 | IPI00292150 | LATENT-TRANSFORMING GROWTH FACTOR BETA-BINDING PROTEIN 2. |
| 842 | IPI00017375 | PROTEIN TRANSPORT PROTEIN SEC23A. |
| 843 | IPI00022420 | RETINOL-BINDING PROTEIN 4. |
| 844 | IPI00000877 | HYPDXIA UP-REGULATED PROTEIN 1. |
| 845 | IPI00024317 | ISOFORM LONG OF GLUTARYL-COA DEHYDROGENASE, MITOCHONDRIAL. |
| 846 | IPI00337541 | NAD(P) TRANSHYDROGENASE, MITOCHONDRIAL. |
| 847 | IPI00000684 | ISOFORM AGX2 OF UDP-N-ACETYLHEXOSAMINE PYROPHOSPHORYLASE. |
| 848 | IPI00386533 | ISOFORM E OF EUKARYOTIC TRANSLATION INITIATION FACTOR 4 GAMMA 1. |
| 849 | IPI00007814 | V-TYPE PROTON ATPASE SUBUNIT C 1. |
| 850 | IPI00020416 | TRIPEPTIDYL-PEPTIDASE 2. |
| 851 | IPI00033217 | ALPHA-AMINOADIPIC SEMIALDEHYDE SYNTHASE, MITOCHONDRIAL. |
| 852 | IPI00029111 | DIHYDROPYRIMIDINASE-RELATED PROTEIN 3 ISOFORM 1. |
| 853 | IPI00448925 | 44 KDA PROTEIN. |
| 854 | IPI00794316 | 24 KDA PROTEIN. |
| 855 | IPI00008178 | ISOFORM 1 OF SODIUM/POTASSIUM-TRANSPORTING ATPASE SUBUNIT |
| | | GAMMA. |
| 856 | IPI00219782 | RETINOL-BINDING PROTEIN 5. |
| 857 | IPI00396131 | CDNA FLJ56221, HIGHLY SIMILAR TO YTH DOMAIN PROTEIN 3. |
| 858 | IPI00975939 | SAA2-SAA2 PROTEIN. |
| 859 | IPI00218918 | ANNEXIN A1. |
| 860 | IPI00001676 | ISOFORM 2 OF NUCLEAR PROTEIN LOCALIZATION PROTEIN 4 HOMOLOG. |
| 861 | IPI00001159 | TRANSLATIONAL ACTIVATOR GCN1. |
| 862 | IPI00013195 | 39S RIBOSOMAL PROTEIN L49, MITOCHONDRIAL. |
| 863 | IPI00003815 | RHO GDP-DISSOCIATION INHIBITOR 1. |
| 864 | IPI00218236 | SERINE/THREONINE-PROTEIN PHOSPHATASE PP1-BETA CATALYTIC SUBUNIT. |
| 865 | IPI00006592 | ISOFORM 1 OF MITOCHONDRIAL PEPTIDE METHIONINE SULFOXIDE |
| | | REDUCTASE. |
| 866 | IPI00158296 | UNCHARACTERIZED PROTEIN. |
| 867 | IPI00009949 | PROTEASOME INHIBITOR PI31 SUBUNIT. |
| 868 | IPI00016910 | EUKARYOTIC TRANSLATION INITIATION FACTOR 3 SUBUNIT C. |
| 869 | IPI00005578 | EH DOMAIN-CONTAINING PROTEIN 4. |
| 870 | IPI00299048 | ISOFORM 1 OF RAS GTPASE-ACTIVATING-LIKE PROTEIN IQGAP2. |
| 871 | IPI00026958 | ISOFORM SHORT OF NADPH:ADRENODOXIN OXIDOREDUCTASE, |
| | | MITOCHONDRIAL. |
| 872 | IPI00291262 | ISOFORM 1 OF CLUSTERIN. |
| 873 | IPI00218192 | ISOFORM 2 OF INTER-ALPHA-TRYPSIN INHIBITOR HEAVY CHAIN H4. |
| 874 | IPI00954463 | KERATIN, TYPE II CYTOSKELETAL 7. |
| 875 | IPI00298497 | FIBRINOGEN BETA CHAIN. |
| 876 | IPI00396321 | LEUCINE-RICH REPEAT-CONTAINING PROTEIN 59. |
| 877 | IPI00015285 | ETHANOLAMINE-PHOSPHATE CYTIDYLYLTRANSFERASE. |
| 878 | IPI00293464 | DNA DAMAGE-BINDING PROTEIN 1. |
| 879 | IPI00025273 | ISOFORM LONG OF TRIFUNCTIONAL PURINE BIOSYNTHETIC PROTEIN |
| | | ADENOSINE-3. |
| 880 | IPI00216219 | ISOFORM LONG OF TIGHT JUNCTION PROTEIN ZO-1. |
| 881 | IPI00339225 | ISOFORM 5 OF FIBRONECTIN. |
| 882 | IPI00011416 | DELTA(3,5)-DELTA(2,4)-DIENOYL-COA ISOMERASE, MITOCHONDRIAL. |
| 883 | IPI00013323 | CYTOCHROME P450 2C19. |
| 884 | IPI00003944 | LIPOAMIDE ACYLTRANSFERASE COMPONENT OF BRANCHED-CHAIN ALPHA- |
| | | KETO ACID DEHYDROGENASE COMPLEX, MITOCHONDRIAL. |
| 885 | IPI00010720 | T-COMPLEX PROTEIN 1 SUBUNIT EPSILON. |
| 886 | IPI00009030 | ISOFORM LAMP-2A OF LYSOSOME-ASSOCIATED MEMBRANE GLYCOPROTEIN |
| | | 2. |
| 887 | IPI00554788 | KERATIN, TYPE I CYTOSKELETAL 18. |
| 888 | IPI00065500 | BRO1 DOMAIN-CONTAINING PROTEIN BROX. |
| 889 | IPI00014363 | BETAINE--HOMOCYSTEINE S-METHYLTRANSFERASE 2. |
| 890 | IPI00745872 | ISOFORM 1 OF SERUM ALBUMIN. |
| 891 | IPI00465315 | CYTOCHROME C. |
| 892 | IPI00549413 | UNCHARACTERIZED PROTEIN. |
| 893 | IPI00550991 | ISOFORM 2 OF ALPHA-1-ANTICHYMOTRYPSIN. |
| 894 | IPI00024266 | MICROSOMAL GLUTATHIONE S-TRANSFERASE 3. |
| 895 | IPI00292946 | THYROXINE-BINDING GLOBULIN. |
| 896 | IPI00013698 | N-ACYLSPHINGOSINE AMIDOHYDROLASE (ACID CERAMIDASE) 1, ISOFORM |
| | | CRA_C. |
| 897 | IPI00217561 | ISOFORM BETA-1C OF INTEGRIN BETA-1. |
| 898 | IPI00022426 | PROTEIN AMBP. |
| 899 | IPI00013193 | ISOFORM 1 OF MYOSIN-VIIA. |
| 900 | IPI00217296 | ISOFORM 3 OF SERINE/THREONINE-PROTEIN PHOSPHATASE 2A ACTIVATOR. |
| 901 | IPI00021370 | ISOFORM 1 OF UBIQUITIN-CONJUGATING ENZYME E2 K. |
| 902 | IPI00018314 | SEC14-LIKE PROTEIN 2. |
| 903 | IPI00479058 | 40S RIBOSOMAL PROTEIN S15. |
| 904 | IPI00329598 | ESTRADIOL 17-BETA-DEHYDROGENASE 11. |
| 905 | IPI00024787 | VERY LONG-CHAIN ACYL-COA SYNTHETASE. |
| 906 | IPI00790342 | 60S RIBOSOMAL PROTEIN L6. |
| 907 | IPI00021440 | ACTIN, CYTOPLASMIC 2. |
| 908 | IPI01011912 | PHOSPHOGLYCERATE KINASE. |
| 909 | IPI00005668 | ALDO-KETO REDUCTASE FAMILY 1 MEMBER C2. |
| 910 | IPI00017726 | ISOFORM 1 OF 3-HYDROXYACYL-COA DEHYDROGENASE TYPE-2. |
| 911 | IPI00021304 | KERATIN, TYPE II CYTOSKELETAL 2 EPIDERMAL. |
| 912 | IPI00024911 | ENDOPLASMIC RETICULUM RESIDENT PROTEIN 29. |
| 913 | IPI00028006 | PROTEASOME SUBUNIT BETA TYPE-2. |
| 914 | IPI00029733 | ALDO-KETO REDUCTASE FAMILY 1 MEMBER Cl. |
| 915 | IPI00171257 | SERINE/THREONINE-PROTEIN KINASE R101 ISOFORM 2. |
| 916 | IPI00293350 | TRANSLIN-ASSOCIATED PROTEIN X. |
| 917 | IPI00297779 | T-COMPLEX PROTEIN 1 SUBUNIT BETA. |
| 918 | IPI00298176 | GLUTATHIONE PEROXIDASE 2. |
| 919 | IPI00397498 | ISOFORM 2 OF CARBAMOYL-PHOSPHATE SYNTHASE [AMMONIA], |
| | | MITOCHONDRIAL. |
| 920 | IPI00465248 | ISOFORM ALPHA-ENOLASE OF ALPHA-ENOLASE. |
| 921 | IPI00514814 | ALDO-KETO REDUCTASE FAMILY 1, MEMBER Cl (DIHYDRODIOL |
| | | DEHYDROGENASE 1. |
| 922 | IPI00607693 | LIVER CARBOXYLESTERASE 1 ISOFORM C PRECURSOR. |
| 923 | IPI00643595 | UNCHARACTERIZED PROTEIN. |
| 924 | IPI00643908 | CDNA FLJ53700, HIGHLY SIMILAR TO HEPATOMA-DERIVED GROWTH |
| | | FACTOR. |
| 925 | IPI00789078 | 14 KDA PROTEIN. |
| 926 | IPI00789134 | GLYCERALDEHYDE-3-PHOSPHATE DEHYDROGENASE. |
| 927 | IPI00792207 | ALDEHYDE DEHYDROGENASE, MITOCHONDRIAL ISOFORM 2 PRECURSOR. |
| 928 | IPI00794900 | CDNA FLJ56016, HIGHLY SIMILAR TO C-1-TETRAHYDROFOLATE SYNTHASE, |
| | | CYTOPLASMIC. |
| 929 | IPI00871858 | CYTOCHROME B-5 ISOFORM 1 VARIANT. |
| 930 | IPI00871915 | UNCHARACTERIZED PROTEIN. |
| 931 | IPI00878282 | 23 KDA PROTEIN. |
| 932 | IPI00927949 | ISOFORM 1 OF ALCOHOL DEHYDROGENASE 4. |
| 933 | IPI00936678 | HYPOTHETICAL PROTEIN LOC100288568. |
| 934 | IPI00940264 | GALACTOKINASE. |
| 935 | IPI00942507 | CDNA FLJ57637, HIGHLY SIMILAR TO LIVER CARBOXYLESTERASE 1. |
| 936 | IPI00942659 | 14 KDA PROTEIN. |
| 937 | IPI00945760 | HYDROXYMETHYLGLUTARYL-COA SYNTHASE, MITOCHONDRIAL ISOFORM 2 |
| | | PRECURSOR. |
| 938 | IPI00978288 | PROTEASOME SUBUNIT BETA TYPE-2 ISOFORM 2. |
| 939 | IPI00980553 | CDNA FLJ50204, HIGHLY SIMILAR TO 2,4-DIENOYL-COA REDUCTASE, |
| | | MITOCHONDRIAL. |
| 940 | IPI00981251 | UNCHARACTERIZED PROTEIN. |
| 941 | IPI01009477 | UNCHARACTERIZED PROTEIN. |
| 942 | IPI00872991 | UNCHARACTERIZED PROTEIN. |
| 943 | IPI01011174 | CDNA, FLJ79393, HIGHLY SIMILAR TO SARCOSINE DEHYDROGENASE, |
| | | MITOCHONDRIAL. |
| 944 | IPI01012004 | CDNA PSEC0175 FIS, CLONE OVARC1000169, HIGHLY SIMILAR TO PROTEIN |
| | | DISULFIDE-ISOMERASE A3. |
| 945 | IPI01012473 | CDNA FLJ57418, HIGHLY SIMILAR TO SHORT/BRANCHED CHAIN SPECIFIC |
| | | ACYL- COADEHYDROGENASE, MITOCHONDRIAL. |
| 946 | IPI01012766 | CDNA, FLJ79260, HIGHLY SIMILAR TO ACTIN, CYTOPLASMIC 2. |
| 947 | IPI00745233 | GLUTATHIONE S-TRANSFERASE A2. |
| 948 | IPI01014091 | UNCHARACTERIZED PROTEIN. |
| 949 | IPI01014382 | UNCHARACTERIZED PROTEIN. |
| 950 | IPI01015455 | 166 KDA PROTEIN. |
| 951 | IPI01015522 | CDNA FLJ55253, HIGHLY SIMILAR TO ACTIN, CYTOPLASMIC 1. |
| 952 | IPI00000874 | PEROXIREDOXIN-1. |
| 953 | IPI00007752 | TUBULIN BETA-2C CHAIN. |
| 954 | IPI00010779 | ISOFORM 1 OF TROPOMYOSIN ALPHA-4 CHAIN. |
| 955 | IPI00013894 | STRESS-INDUCED-PHOSPHOPROTEIN 1. |
| 956 | IPI00021439 | ACTIN, CYTOPLASMIC 1. |
| 957 | IPI00022774 | TRANSITIONAL ENDOPLASMIC RETICULUM ATPASE. |
| 958 | IPI00022895 | ISOFORM 1 OF ALPHA-1B-GLYCOPROTEIN. |
| 959 | IPI00037070 | UNCHARACTERIZED PROTEIN. |
| 960 | IPI00062003 | ACAT1 PROTEIN. |
| 961 | IPI00514320 | UNCHARACTERIZED PROTEIN. |
| 962 | IPI00604607 | UNCHARACTERIZED PROTEIN. |
| 963 | IPI00645363 | PUTATIVE UNCHARACTERIZED PROTEIN DKFZP686P15220. |
| 964 | IPI00646055 | UNCHARACTERIZED PROTEIN. |
| 965 | IPI00654755 | HEMOGLOBIN SUBUNIT BETA. |
| 966 | IPI00790739 | UNCHARACTERIZED PROTEIN. |
| 967 | IPI00792290 | ISOFORM 2 OF WD REPEAT-CONTAINING PROTEIN 66. |
| 968 | IPI00792677 | CDNA FLJ60097, HIGHLY SIMILAR TO TUBULIN ALPHA-UBIQUITOUS CHAIN. |
| 969 | IPI00845339 | CDNA FLJ54370, HIGHLY SIMILAR TO HEAT SHOCK 70 KDA PROTEIN 1. |
| 970 | IPI00903145 | RADIXIN. |
| 971 | IPI00917331 | UNCHARACTERIZED PROTEIN. |
| 972 | IPI00925411 | UNCHARACTERIZED PROTEIN. |
| 973 | IPI00925747 | PEPTIDYL-PROLYL CIS-TRANS ISOMERASE. |
| 974 | IPI00927101 | UNCHARACTERIZED PROTEIN. |
| 975 | IPI00930124 | PUTATIVE UNCHARACTERIZED PROTEIN DKFZP686C11235. |
| 976 | IPI00783987 | COMPLEMENT C3 (FRAGMENT). |
| 977 | IPI01011434 | UNCHARACTERIZED PROTEIN. |
| 978 | IPI01012499 | UNCHARACTERIZED PROTEIN. |
| 979 | IPI00746165 | ISOFORM 1 OF WD REPEAT-CONTAINING PROTEIN 1 |
| 980 | O00418 | Eucaryotic elongation factor 2 kinase |
| 981 | Q13043 | serine/threonine kinase 4 |
| 982 | Q13188 | serine/threonine kinase 3 (STE20 homolog) |
| 983 | Q9BXU1 | serine/threonine kinase 31 |

The application's sequence listing, which the Patent Office published only in electronic form, follows.

SEQUENCE LISTING (983 sequences)

SEQ ID NO: 1 - protein, 134 aa, Homo Sapiens
MSFSGKYQLQSQENFEAFMKAIGLPEELIQKGKDIKGVSEIVQNGKHFKFTITAGSKVIQNEFTVGEECELETMTGEKVKTVVQLEGDNKLVTTFKNIKSVTELNGDIITNTMTLGDIVFKRISKKKKKKKKKK

SEQ ID NO: 2 - protein, 375 aa, Homo Sapiens
MSTAGKVIKCKAAVLWELKKPFSIEEVEVAPPKAHEVRIKMVAVGICGTDDHVVSGTMVTPLPVILGHEAAGIVESVGEGVTTVKPGDKVIPLAIPQCGKCRICKNPESNYCLKNDVSNPQGTLQDGTSRFTCRRKPIHHFLGISTFSQYTVVDENAVAKIDAASPLEKVCLIGCGFSTGYGSAVNVAKVTPGSTCAVFGLGGVGLSAIMGCKAAGAARIIAVDINKDKFAKAKELGATECINPQDYKKPIQEVLKEMTDGGVDFSFEVIGRLDTMMASLLCCHEACGTSVIVGVPPDSQNLSMNPMLLLTGRTWKGAILGGFKSKECVPKLVADFMAKKFSLDALITHVLPFEKINEGFDLLHSGKSIRTILMF

SEQ ID NO: 3 - protein, 375 aa, Homo Sapiens [sequence omitted]

SEQ ID NO: 4 - protein, 375 aa, Homo Sapiens
MSTAGKVIKCKAAVLWELKKPFSIEEVEVAPPKAHEVRIKMVAAGICRSDEHVVSGNLVTPLPVILGHEAAGIVESVGEGVTTVKPGDKVIPLFTPQCGKCRICKNPESNYCLKNDLGNPRGTLQDGTRRFTCSGKPIHHFVGVSTFSQYTVVDENAVAKIDAASPLEKVCLIGCGFSTGYGSAVKVAKVTPGSTCAVFGLGGVGLSVVMGCKAAGAARIIAVDINKDKFAKAKELGATECINPQDYKKPIQEVLKEMTDGGVDFSFEVIGRLDTMMASLLCCHEACGTSVIVGVPPDSQNLSINPMLLLTGRTWKGAIFGGFKSKESVPKLVADFMAKKFSLDALITNILPFEKINEGFDLLRSGKSIRTVLTF

SEQ ID NO: 5 - protein, 364 aa, Homo Sapiens
MAHRFPALTQEQKKELSEIAQSIVANGKGILAADESVGTMGNRLQRIKVENTEENRRQFREILFSVDSSINQSIGGVILFHETLYQKDSQGKLFRNILKEKGIVVGIKLDQGGAPLAGTNKETTIQGLDGLSERCAQYKKDGVDFGKWRAVLRIADQCPSSLAIQENANALARYASICQQNGLVPIVEPEVIPDGDHDLEHCQYVTEKVLAAVYKALNDHHVYLEGTLLKPNMVTAGHACTKKYTPEQVAMATVTALHRTVPAAVPGICFLSGGMSEEDATLNLNAINLCPLPKPWKLSFSYGRALQASALAAWGGKAANKEATQEAFMKRAMANCQAAKGQYVHTGSSGAASTQSLFTACYTY

SEQ ID NO: 6 - protein, 142 aa, Homo Sapiens
MVLSPADKTNVKAAWGKVGAHAGEYGAEALERMFLSFPTTKTYFPHFDLSHGSAQVKGHGKKVADALTNAVAHVDDMPNALSALSDLHAHKLRVDPVNFKLLSHCLLVTLAAHLPAEFTPAVHASLDKFLASVSTVLTSKYR

SEQ ID NO: 7 - protein, 1500 aa, Homo Sapiens
MTRILTAFKVVRTLKTGFGFTNVTAHQKWKFSRPGIRLLSVKAQTAHIVLEDGTKMKGYSFGHPSSVAGEVVFNTGLGGYPEAITDPAYKGQILTMANPIIGNGGAPDTTALDELGLSKYLESNGIKVSGLLVLDYSKDYNHWLATKSLGQWLQEEKVPAIYGVDTRMLTKIIRDKGTMLGKIEFEGQPVDFVDPNKQNLIAEVSTKDVKVYGKGNPTKVVAVDCGIKNNVIRLLVKRGAEVHLVPWNHDFTKMEYDGILIAGGPGNPALAEPLIQNVRKILESDRKEPLFGISTGNLITGLAAGAKTYKMSMANRGQNQPVLNITNKQAFITAQNHGYALDNTLPAGWKPLFVNVNDQTNEGIMHESKPFFAVQFHPEVTPGPIDTEYLFDSFFSLIKKGKATTITSVLPKPALVASRVEVSKVLILGSGGLSIGQAGEFDYSGSQAVKAMKEENVKTVLMNPNIASVQTNEVGLKQADTVYFLPITPQFVTEVIKAEQPDGLILGMGGQTALNCGVELFKRGVLKEYGVKVLGTSVESIMATEDRQLFSDKLNEINEKIAPSFAVESIEDALKAADTIGYPVMIRSAYALGGLGSGICPNRETLMDLSTKAFAMTNQILVEKSVTGWKEIEYEVVRDADDNCVTVCNMENVDAMGVHTGDSVVVAPAQTLSNAEFQMLRRTSINVVRHLGIVGECNIQFALHPTSMEYCIIEVNARLSRSSALASKATGYPLAFIAAKIALGIPLPEIKNVVSGKTSACFEPSLDYMVTKIPRWDLDRFHGTSSRIGSSMKSVGEVMAIGRTFEESFQKALRMCHPSIEGFTPRLPMNKEWPSNLDLRKELSEPSSTRIYAIAKAIDDNMSLDEIEKLTYIDKWFLYKMRDILNMEKTLKGLNSESMTEETLKRAKEIGFSDKQISKCLGLTEAQTRELRLKKNIHPWVKQIDTLAAEYPSVTNYLYVTYNGQEHDVNFDDHGMMVLGCGPYHIGSSVEFDWCAVSSIRTLRQLGKKTVVVNCNPETVSTDFDECDKLYFEELSLERILDIYHQEACGGCIISVGGQIPNNLAVPLYKNGVKIMGTSPLQIDRAEDRSIFSAVLDELKVAQAPWKAVNTLNEALEFAKSVDYPCLLRPSYVLSGSAMNVVFSEDEMKKFLEEATRVSQEHPVVLTKFVEGAREVEMDAVGKDGRVISHAISEHVEDAGVHSGDATLMLPTQTISQGAIEKVKDATRKIAKAFAISGPFNVQFLVKGNDVLVIECNLRASRSFPFVSKTLGVDFIDVATKVMIGENVDEKHLPTLDHPIIPADYVAIKAPMFSWPRLRDADPILRCEMASTGEVACFGEGIHTAFLKAMLSTGFKIPQKGILIGIQQSFRPRFLGVAEQLHNEGFKLFATEATSDWLNANNVPATPVAWPSQEGQNPSLSSIRKLIRDGSIDLVINLPNNNTKFVHDNYVIRRTAVDSGIPLLTNFQVTKLFAEAVQKSRKVDSKSLFHYRQYSAGKAA

SEQ ID NO: 8 - protein, 364 aa, Homo Sapiens
MPYQYPALTPEQKKELSDIAHRIVAPGKGILAADESTGSIAKRLQSIGTENTEENRRFYRQLLLTADDRVNPCIGGVILFHETLYQKADDGRPFPQVIKSKGGVVGIKVDKGVVPLAGTNGETTTQGLDGLSERCAQYKKDGADFAKWRCVLKIGEHTPSALAIMENANVLARYASICQQNGIVPIVEPEILPDGDHDLKRCQYVTEKVLAAVYKALSDHHIYLEGTLLKPNMVTPGHACTQKFSHEEIAMATVTALRRTVPPAVTGITFLSGGQSEEEASINLNAINKCPLLKPWALTFSYGRALQASALKAWGGKKENLKAAQEEYVKRALANSLACQGKYTPSGQAGAAASESLFVSNHAY

SEQ ID NO: 9 - protein, 517 aa, Homo Sapiens
MLRAAARFGPRLGRRLLSAAATQAVPAPNQQPEVFCNQIFINNEWHDAVSRKTFPTVNPSTGEVICQVAEGDKEDVDKAVKAARAAFQLGSPWRRMDASHRGRLLNRLADLIERDRTYLAALETLDNGKPYVISYLVDLDMVLKCLRYYAGWADKYHGKTIPIDGDFFSYTRHEPVGVCGQIIPWNFPLLMQAWKLGPALATGNVVVMKVAEQTPLTALYVANLIKEAGFPPGVVNIVPGFGPTAGAAIASHEDVDKVAFTGSTEIGRVIQVAAGSSNLKRVTLELGGKSPNIIMSDADMDWAVEQAHFALFFNQGQCCCAGSRTFVQEDIYDEFVERSVARAKSRVVGNPFDSKTEQGPQVDETQFKKILGYINTGKQEGAKLLCGGGIAADRGYFIQPTVFGDVQDGMTIAKEEIFGPVMQILKFKTIEEVVGRANNSTYGLAAAVFTKDLDKANYLSQALQAGTVWVNCYDVFGAQSPFGGYKMSGSGRELGEYGLQAYTEVKTVTVKVPQKNS

SEQ ID NO: 10 - protein, 501 aa, Homo Sapiens
MSSSGTPDLPVLLTDLKIQYTKIFINNEWHDSVSGKKFPVFNPATEEELCQVEEGDKEDVDKAVKAARQAFQIGSPWRTMDASERGRLLYKLADLIERDRLLLATMESMNGGKLYSNAYLNDLAGCIKTLRYCAGWADKIQGRTIPIDGNFFTYTRHEPIGVCGQIIPWNFPLVMLIWKIGPALSCGNTVVVKPAEQTPLTALHVASLIKEAGFPPGVVNIVPGYGPTAGAAISSHMDIDKVAFTGSTEVGKLIKEAAGKSNLKRVTLELGGKSPCIVLADADLDNAVEFAHHGVFYHQGQCCIAASRIFVEESIYDEFVRRSVERAKKYILGNPLTPGVTQGPQIDKEQYDKILDLIESGKKEGAKLECGGGPWGNKGYFVQPTVFSNVTDEMRIAKEEIFGPVQQIMKFKSLDDVIKRANNTFYGLSAGVFTKDIDKAITISSALQAGTVWVNCYGVVSAQCPFGGFKMSGNGRELGEYGFHEYTEVKTVTVKISQKNS

SEQ ID NO: 11 - protein, 517 aa, Homo Sapiens
MLRFLAPRLLSLQGRTARYSSAAALPSPILNPDIPYNQLFINNEWQDAVSKKTFPTVNPTTGEVIGHVAEGDRADVDRAVKAAREAFRLGSPWRRMDASERGRLLNLLADLVERDRVYLASLETLDNGKPFQESYALDLDEVIKVYRYFAGWADKWHGKTIPMDGQHFCFTRHEPVGVCGQIIPWNFPLVMQGWKLAPALATGNTVVMKVAEQTPLSALYLASLIKEAGFPPGVVNIITGYGPTAGAAIAQHVDVDKVAFTGSTEVGHLIQKAAGDSNLKRVTLELGGKSPSIVLADADMEHAVEQCHEALFFNMGQCCCAGSRTFVEESIYNEFLERTVEKAKQRKVGNPFELDTQQGPQVDKEQFERVLGYIQLGQKEGAKLLCGGERFGERGFFIKPTVFGGVQDDMRIAKEEIFGPVQPLFKFKKIEEVVERANNTRYGLAAAVFTRDLDKAMYFTQALQAGTVWVNTYNIVTCHTPFGGFKESGNGRELGEDGLKAYTEVKTVTIKVPQKNS

SEQ ID NO: 12 - protein, 399 aa, Homo Sapiens
MLVRGPHFELQRCKTHLFSSNYLTQVIKCKAAIAWEAGKPLCIEEVEVAPPKAHEVRIQIIATSLCHTDATVIDSKFEGLAFPVIVGHEAAGIVESIGPGVTNVKPGDKVIPLYAPLCRKCKFCLSPLTNLCGKISNLKSPASDQQLMEDKTSRFTCKGKPVYHFFGTSTFSQYTVVSDINLAKIDDDANLERVCLLGCGFSTGYGAAINNAKVTPGSTCAVFGLGGVGLSAVMGCKAAGASRIIGIDINSEKFVKAKALGATDCLNPRDLHKPIQEVIIELTKGGVDFALDCAGGSETMKAALDCTTAGWGSCTFIGVAAGSKGLTIFPEELIIGRTINGTFFGGWKSVDSIPKLVTDYKNKKFNLDALVTHTLPFDKISEAFDLMNQGKSVRTILIF

SEQ ID NO: 13 - protein, 912 aa, Homo Sapiens
MAGPSNPPATMKIAVIGQSLFGQEVYCHLRKEGHEVVGVFTVPDKDGKADPLGLEAEKDGVPVFKYSRWRAKGQALPDVVAKYQALGAELNVLPFCSQFIPMEIISAPRHGSIIYHPSLLPRHRGASAINWTLIHGDKKGGFSIFWADDGLDTGDLLLQKECEVLPDDTVSTLYNRFLFPEGIKGMVQAVRLIAEGKAPRLPQPEEGATYEGIQKKETAKINWDQPAEAIHNWIRGNDKVPGAWTEACEQKLTFFNSTLNTSGLVPEGDALPIPGAHRPGVVTKAGLILFGNDDKMLLVKNIQLEDGKMILASNFFKGAASSVLELTEAELVTAEAVRSVWQRILPKVLEVEDSTDFFKSGAASVDVVRLVEEVKELCDGLELENEDVYMASTFGDFIQLLVRKLRGDDEEGECSIDYVEMAVNKRTVRMPHQLFIGGEFVDAEGAKTSETINPTDGSVICQVSLAQVTDVDKAVAAAKDAFENGRWGKISARDRGRLMYRLADLMEQHQEELATIEALDAGAVYTLALKTHVGMSIQTFRYFAGWCDKIQGSTIPINQARPNRNLTLTRKEPVGVCGIIIPWNYPLMMLSWKTAACLAAGNTVVIKPAQVTPLTALKFAELTLKAGIPKGVVNVLPGSGSLVGQRLSDHPDVRKIGFTGSTEVGKHIMKSCAISNVKKVSLELGGKSPLIIFADCDLNKAVQMGMSSVFFNKGENCIAAGRLFVEDSIHDEFVRRVVEEVRKMKVGNPLDRDTDHGPQNHHAHLVKLMEYCQHGVKEGATLVCGGNQVPRPGFFFEPTVFTDVEDHMFIAKEESFGPVMIISRFADGDLDAVLSRANATEFGLASGVFTRDINKALYVSDKLQAGTVFVNTYNKTDVAAPFGGFKQSGFGKDLGEAALNEYLRVKTVTFEY

SEQ ID NO: 14 - protein, 244 aa, Homo Sapiens
MELFLAGRRVLVTGAGKGIGRGTVQALHATGARVVAVSRTQADLDSLVRECPGIEPVCVDLGDWEATERALGSVGPVDLLVNNAAVALLQPFLEVTKEAFDRSFEVNLRAVIQVSQIVARGLIARGVPGAIVNVSSQCSQRAVTNHSVYCSTKGALDMLTKVMALELGPHKIRVNAVNPTVVMTSMGQATWSDPHKAKTMLNRIPLGKFAEVEHVVNAILFLLSDRSGMTTGSTLPVEGGFWAC

SEQ ID NO: 15 - protein, 406 aa, Homo Sapiens
MPPVGGKKAKKGILERLNAGEIVIGDGGFVFALEKRGYVKAGPWTPEAAVEHPEAVRQLHREFLRAGSNVMQTFTFYASEDKLENRGNYVLEKISGQEVNEAACDIARQVADEGDALVAGGVSQTPSYLSCKSETEVKKVFLQQLEVFMKKNVDFLIAEYFEHVEEAVWAVETLIASGKPVAATMCIGPEGDLHGVPPGECAVRLVKAGASIIGVNCHFDPTISLKTVKLMKEGLEAARLKAHLMSQPLAYHTPDCNKQGFIDLPEFPFGLEPRVATRWDIQKYAREAYNLGVRYIGGCCGFEPYHIRAIAEELAPERGFLPPASEKHGSWGSGLDMHTKPWVRARARKEYWENLRIASGRPYNPSMSKPDGWGVTKGTAELMQQKEATTEQQLKELFEKQKFKSQ

SEQ ID NO: 16 - protein, 154 aa, Homo Sapiens [sequence omitted]

SEQ ID NO: 17 - protein, 508 aa, Homo Sapiens
MQRLLTPVKRILQLTRAVQETSLTPARLLPVAHQRFSTASAVPLAKTDTWPKDVGILALEVYFPAQYVDQTDLEKYNNVEAGKYTVGLGQTRMGFCSVQEDINSLCLTVVQRLMERIQLPWDSVGRLEVGTETIIDKSKAVKTVLMELFQDSGNTDIEGIDTTNACYGGTASLFNAANWMESSSWDGRYAMVVCGDIAVYPSGNARPTGGAGAVAMLIGPKAPLALERGLRGTHMENVYDFYKPNLASEYPIVDGKLSIQCYLRALDRCYTSYRKKIQNQWKQAGSDRPFTLDDLQYMIFHTPFCKMVQKSLARLMFNDFLSASSDTQTSLYKGLEAFGGLKLEDTYTNKDLDKALLKASQDMFDKKTKASLYLSTHNGNMYTSSLYGCLASLLSHHSAQELAGSRIGAFSYGSGLAASFFSFRVSQDAAPGSPLDKLVSSTSDLPKRLASRKCVSPEEFTEIMNQREQFYHKVNFSPPGDTNSLFPGTWYLERVDEQHRRKYARRPV

SEQ ID NO: 18 - protein, 520 aa, Homo Sapiens
MPGSLPLNAEACWPKDVGIVALEIYFPSQYVDQAELEKYDGVDAGKYTIGLGQAKMGFCTDREDINSLCMTVVQNLMERNNLSYDCIGRLEVGTETIIDKSKSVKTNLMQLFEESGNTDIEGIDTTNACYGGTAAVFNAVNWIESSSWDGRYALVVAGDIAVYATGNARPTGGVGAVALLIGPNAPLIFERGLRGTHMQHAYDFYKPDMLSEYPIVDGKLSIQCYLSALDRCYSVYCKKIHAQWQKEGNDKDFTLNDFGFMIFHSPYCKLVQKSLARMLLNDFLNDQNRDKNSIYSGLEAFGDVKLEDTYFDRDVEKAFMKASSELFSQKTKASLLVSNQNGNMYTSSVYGSLASVLAQYSPQQLAGKRIGVFSYGSGLAATLYSLKVTQDATPGSALDKITASLCDLKSRLDSRTGVAPDVFAENMKLREDTHHLVNYIPQGSIDSLFEGTWYLVRVDEKHRRTYARRPTPNDDTLDEGVGLVHSNIATEHIPSPAKKVPRLPATAAEPEAAVISNGEH

SEQ ID NO: 19 - protein, 483 aa, Homo Sapiens
MSIRVTQKSYKVSTSGPRAFSSRSYTSGPGSRISSSSFSRVGSSNFRGGLGGGYGGASGMGGITAVTVNQSLLSPLVLEVDPNIQAVRTQEKEQIKTLNNKFASFIDKVRFLEQQNKMLETKWSLLQQQKTARSNMDNMFESYINNLRRQLETLGQEKLKLEAELGNMQGLVEDFKNKYEDEINKRTEMENEFVLIKKDVDEAYMNKVELESRLEGLTDEINFLRQLYEEEIRELQSQISDTSVVLSMDNSRSLDMDSIIAEVKAQYEDIANRSRAEAESMYQIKYEELQSLAGKHGDDLRRTKTEISEMNRNISRLQAEIEGLKGQRASLEAAIADAEQRGELAIKDANAKLSELEAALQRAKQDMARQLREYQELMNVKLALDIEIATYRKLLEGEESRLESGMQNMSIHTKTTSGYAGGLSSAYGGLTSPGLSYSLGSSFGSGAGSSSFSRTSSSRAVVVKKIETRDGKLVSESSDVLPK

SEQ ID NO: 20 - protein, 187 aa, Homo Sapiens
MPVDLSKWSGPLSLQEVDEQPQHPLHVTYAGAAVDELGKVLTPTQVKNRPTSISWDGLDSGKLYTLVLTDPDAPSRKDPKYREWHHFLVVNMKGNDISSGTVLSDYVGSGPPKGTGLHRYVWLVYEQDRPLKCDEPILSNRSGDHRGKFKVASFRKKYELRAPVAGTCYQAEWDDYVPKLYEQLSGK

SEQ ID NO: 21 - protein, 558 aa, Homo Sapiens
MYRYLGEALLLSRAGPAALGSASADSAALLGWARGQPAAAPQPGLALAARRHYSEAVADREDDPNFFKMVEGFFDRGASIVEDKLVEDLRTRESEEQKRNRVRGILRIIKPCNHVLSLSFPIRRDDGSWEVIEGYRAQHSQHRTPCKGGIRYSTDVSVDEVKALASLMTYKCAVVDVPFGGAKAGVKINPKNYTDNELEKITRRFTMELAKKGFIGPGIDVPAPDMSTGEREMSWIADTYASTIGHYDINAHACVTGKPISQGGIHGRISATGRGVFHGIENFINEASYMSILGMTPGFGDKTFVVQGFGNVGLHSMRYLHRFGAKCIAVGESDGSIWNPDGIDPKELEDFKLQHGSILGFPKAKPYEGSILEADCDILIPAASEKQLTKSNAPRVKAKIIAEGANGPTTPEADKIFLERNIMVIPDLYLNAGGVTVSYFEWLKNLNHVSYGRLTFKYERDSNYHLLMSVQESLERKFGKHGGTIPIVPTAEFQDRISGASEKDIVHSGLAYTMERSARQIMRTAMKYNLGLDLRTAAYVNAIEKVFKVYNEAGVTFT

SEQ ID NO: 22 - protein, 567 aa, Homo Sapiens
MWLRAFILATLSASAAWGHPSSPPVVDTVHGKVLGKFVSLEGFAQPVAIFLGIPFAKPPLGPLRFTPPQPAEPWSFVKNATSYPPMCTQDPKAGQLLSELFTNRKENIPLKLSEDCLYLNIYTPADLTKKNRLPVMVWIHGGGLMVGAASTYDGLALAAHENVVVVTIQYRLGIWGFFSTGDEHSRGNWGHLDQVAALRWVQDNIASFGGNPGSVTIFGESAGGESVSVLVLSPLAKNLFHRAISESGVALTSVLVKKGDVKPLAEQIAITAGCKTTTSAVMVHCLRQKTEEELLETTLKMKFLSLDLQGDPRESQPLLGTVIDGMLLLKTPEELQAERNFHTVPYMVGINKQEFGWLIPMQLMSYPLSEGQLDQKTAMSLLWKSYPLVCIAKELIPEATEKYLGGTDDTVKKKDLFLDLIADVMFGVPSVIVARNHRDAGAPTYMYEFQYRPSFSSDMKPKTVIGDHGDELFSVFGAPFLKEGASEEEIRLSKMVMKFWANFARNGNPNGEGLPHWPEYNQKEGYLQIGANTQAAQKLKDKEVAFWTNLFAKKAVEKPPQTEHIEL

SEQ ID NO: 23 - protein, 128 aa, Homo Sapiens
MAGGKAGKDSGKAKAKAVSRSQRAGLQFPVGRIHRHLKTRTTSHGRVGATAAVYSAAILEYLTAEVLELAGNASKDLKVKRITPRHLQLAIRGDEELDSLIKATIAGGGVIPHIHKSLIGKKGQQKTA

SEQ ID NO: 24 - protein, 724 aa, Homo Sapiens
MPEEVHHGEEEVETFAFQAEIAQLMSLIINTFYSNKEIFLRELISNASDALDKIRYESLTDPSKLDSGKELKIDIIPNPQERTLTLVDTGIGMTKADLINNLGTIAKSGTKAFMEALQAGADISMIGQFGVGFYSAYLVAEKVVVITKHNDDEQYAWESSAGGSFTVRADHGEPIGRGTKVILHLKEDQTEYLEERRVKEVVKKHSQFIGYPITLYLEKEREKEISDDEAEEEKGEKEEEDKDDEEKPKIEDVGSDEEDDSGKDKKKKTKKIKEKYIDQEELNKTKPIWTRNPDDITQEEYGEFYKSLTNDWEDHLAVKHFSVEGQLEFRALLFIPRRAPFDLFENKKKKNNIKLYVRRVFIMDSCDELIPEYLNFIRGVVDSEDLPLNISREMLQQSKILKVIRKNIVKKCLELFSELAEDKENYKKFYEAFSKNLKLGIHEDSTNRRRLSELLRYHTSQSGDEMTSLSEYVSRMKETQKSIYYITGESKEQVANSAFVERVRKRGFEVVYMTEPIDEYCVQQLKEFDGKSLVSVTKEGLELPEDEEEKKKMEESKAKFENLCKLMKEILDKKVEKVTISNRLVSSPCCIVTSTYGWTANMERIMKAQALRDNSTMGYMMAKKHLEINPDHPIVETLRQKAEADKNDKAVKDLVVLLFETALLSSGFSLEDPQTHSNRIYRMIKLGLGIDEDEVAAEEPNAAVPDEIPPLEGDEDASRMEEVD

SEQ ID NO: 25 - protein, 803 aa, Homo Sapiens
MRALWVLGLCCVLLTFGSVRADDEVDVDGTVEEDLGKSREGSRTDDEVVQREEEAIQLDGLNASQIRELREKSEKFAFQAEVNRMMKLIINSLYKNKEIFLRELISNASDALDKIRLISLTDENALSGNEELTVKIKCDKEKNLLHVTDTGVGMTREELVKNLGTIAKSGTSEFLNKMTEAQEDGQSTSELIGQFGVGFYSAFLVADKVIVTSKHNNDTQHIWESDSNEFSVIADPRGNTLGRGTTITLVLKEEASDYLELDTIKNLVKKYSQFINFPIYVWSSKTETVEEPMEEEEAAKEEKEESDDEAAVEEEEEEKKPKTKKVEKTVWDWELMNDIKPIWQRPSKEVEEDEYKAFYKSFSKESDDPMAYIHFTAEGEVTFKSILFVPTSAPRGLFDEYGSKKSDYIKLYVRRVFITDDFHDMMPKYLNFVKGVVDSDDLPLNVSRETLQQHKLLKVIRKKLVRKTLDMIKKIADDKYNDTFWKEFGTNIKLGVIEDHSNRTRLAKLLRFQSSHHPTDITSLDQYVERMKEKQDKIYFMAGSSRKEAESSPFVERLLKKGYEVIYLTEPVDEYCIQALPEFDGKRFQNVAKEGVKFDESEKTKESREAVEKEFEPLLNWMKDKALKDKIEKAVVSQRLTESPCALVASQYGWSGNMERIMKAQAYQTGKDISTNYYASQKKTFEINPRHPLIRDMLRRIKEDEDDKTVLDLAVVLFETATLRSGYLLPDTKAYGDRIERMLRLSLNIDPDAKVEEEPEEEPEETAEDTTEDTEQDEDEEMDVGTDEEEETAKESTAEKDEL

SEQ ID NO: 26 - protein, 646 aa, Homo Sapiens
MSKGPAVGIDLGTTYSCVGVFQHGKVEIIANDQGNRTTPSYVAFTDTERLIGDAAKNQVAMNPTNTVFDAKRLIGRRFDDAVVQSDMKHWPFMVVNDAGRPKVQVEYKGETKSFYPEEVSSMVLTKMKEIAEAYLGKTVTNAVVTVPAYFNDSQRQATKDAGTIAGLNVLRIINEPTAAAIAYGLDKKVGAERNVLIFDLGGGTFDVSILTIEDGIFEVKSTAGDTHLGGEDFDNRMVNHFIAEFKRKHKKDISENKRAVRRLRTACERAKRTLSSSTQASIEIDSLYEGIDFYTSITRARFEELNADLFRGTLDPVEKALRDAKLDKSQIHDIVLVGGSTRIPKIQKLLQDFFNGKELNKSINPDEAVAYGAAVQAAILSGDKSENVQDLLLLDVTPLSLGIETAGGVMTVLIKRNTTIPTKQTQTFTTYSDNQPGVLIQVYEGERAMTKDNNLLGKFELTGIPPAPRGVPQIEVTFDIDANGILNVSAVDKSTGKENKITITNDKGRLSKEDIERMVQEAEKYKAEDEKQRDKVSSKNSLESYAFNMKATVEDEKLQGKINDEDKQKILDKCNEIINWLDKNQTAEKEEFEHQQKELEKVCNPIITKLYQSAGGMPGGMPGGFPGGGAPPSGGASSGPTIEEVD

SEQ ID NO: 27 - protein, 654 aa, Homo Sapiens
MKLSLVAAMLLLLSAARAEEEDKKEDVGTVVGIDLGTTYSCVGVFKNGRVEIIANDQGNRITPSYVAFTPEGERLIGDAAKNQLTSNPENTVFDAKRLIGRTWNDPSVQQDIKFLPFKVVEKKTKPYIQVDIGGGQTKTFAPEEISAMVLTKMKETAEAYLGKKVTHAVVTVPAYFNDAQRQATKDAGTIAGLNVMRIINEPTAAAIAYGLDKREGEKNILVFDLGGGTFDVSLLTIDNGVFEVVATNGDTHLGGEDFDQRVMEHFIKLYKKKTGKDVRKDNRAVQKLRREVEKAKRALSSQHQARIEIESFYEGEDFSETLTRAKFEELNMDLFRSTMKPVQKVLEDSDLKKSDIDEIVLVGGSTRIPKIQQLVKEFFNGKEPSRGINPDEAVAYGAAVQAGVLSGDQDTGDLVLLDVCPLTLGIETVGGVMTKLIPRNTVVPTKKSQIFSTASDNQPTVTIKVYEGERPLTKDNHLLGTFDLTGIPPAPRGVPQIEVTFEIDVNGILRVTAEDKGTGNKNKITITNDQNRLTPEEIERMVNDAEKFAEEDKKLKERIDTRNELESYAYSLKNQIGDKEKLGGKLSSEDKETMEKAVEEKIEWLESHQDADIEDFKAKKKELEEIVQPIISKLYGSAGPPPTGEEDTAEKDEL

SEQ ID NO: 28 - protein, 397 aa, Homo Sapiens
MALLRGVFVVAAKRTPFGAYGGLLKDFTATDLSEFAAKAALSAGKVSPETVDSVIMGNVLQSSSDAIYLARHVGLRVGIPKETPALTINRLCGSGFQSIVNGCQEICVKEAEVVLCGGTESMSQAPYCVRNVRFGTKLGSDIKLEDSLWVSLTDQHVQLPMAMTAENLAVKHKISREECDKYALQSQQRWKAANDAGYFNDEMAPIEVKTKKGKQTMQVDEHARPQTTLEQLQKLPPVFKKDGTVTAGNASGVADGAGAVIIASEDAVKKHNFTPLARIVGYFVSGCDPSIMGIGPVPAISGALKKAGLSLKDMDLVEVNEAFAPQYLAVERSLDLDISKTNVNGGAIALGHPLGGSGSRITAHLVHELRRRGGKYAVGSACIGGGQGIAVIIQSTA

SEQ ID NO: 29 - protein, 474 aa, Homo Sapiens
MTILTYPFKNLPTASKWALRFSIRPLSCSSQLRAAPAVQTKTKKTLAKPNIRNVVVVDGVRTPFLLSGTSYKDLMPHDLARAALTGLLHRTSVPKEVVDYIIFGTVIQEVKTSNVAREAALGAGFSDKTPAHTVTMACISANQAMTTGVGLIASGQCDVIVAGGVELMSDVPIRHSRKMRKLMLDLNKAKSMGQRLSLISKFRFNFLAPELPAVSEFSTSETMGHSADRLAAAFAVSRLEQDEYALRSHSLAKKAQDEGLLSDVVPFKVPGKDTVTKDNGIRPSSLEQMAKLKPAFIKPYGTVTAANSSFLTDGASAMLIMAEEKALAMGYKPKAYLRDFMYVSQDPKDQLLLGPTYATPKVLEKAGLTMNDIDAFEFHEAFSGQILANFKAMDSDWFAENYMGRKTKVGLPPLEKFNNWGGSLSLGHPFGATGCRLVMAAANRLRKEGGQYGLVAACAAGGQGHAMIVEAYPK

SEQ ID NO: 30 - protein, 450 aa, Homo Sapiens
MCRTPQLQGTPALFLRVVHCTVKTDSRRRELTPPIPDAMSSKGSVVLAYSGGLDTSCILVWLKEQGYDVIAYLANIGQKEDFEEARKKALKLGAKKVFIEDVSREFVEEFIWPAIQSSALYEDRYLLGTSLARPCIARKQVEIAQREGAKYVSHGATGKGNDQVRFELSCYSLAPQIKVIAPWRMPEFYNRFKGRNDLMEYAKQHGIPIPVTPKNPWSMDENLMHISYEAGILENPKNQAPPGLYTKTQDPAKAPNTPDILEIEFKKGVPVKVTNVKDGTTHQTSLELFMYLNEVAGKHGVGRIDIVENRFIGMKSRGIYETPAGTILYHAHLDIEAFTMDREVRKIKQGLGLKFAELVYTGFWHSPECEFVRHCIAKSQERVEGKVQVSVLKGQVYILGRESPLSLYNEELVSMNVQGDYEPTDATGFININSLRLKEYHRLQSKVTAK

SEQ ID NO: 31 - protein, 137 aa, Homo Sapiens
MSSLIRRVISTAKAPGAIGPYSQAVLVDRTIYISGQIGMDPSSGQLVSGGVAEEAKQALKNMGEILKAAGCDFTNVVKTTVLLADINDFNTVNEIYKQYFKSNFPARAAYQVAALPKGSRIEIEAVAIQGPLTTASL

SEQ ID NO: 32 - protein, 128 aa, Homo Sapiens
MQIFVKTLTGKTITLEVEPSDTIENVKAKIQDKEGIPPDQQRLIFAGKQLEDGRTLSDYNIQKESTLHLVLRLRGGIIEPSLRQLAQKYNCDKMICRKCYARLHPRAVNCRKKKCGHTNNLRPKKKVK

SEQ ID NO: 33 - protein, 854 aa, Homo Sapiens
MPPCSGGDGSTPPGPSLRDRDCPAQSAEYPRDRLDPRPGSPSEASSPPFLRSRAPVNWYQEKAQVFLWHLMVSGSTTLLCLWKQPFHVSAFPVTASLAFRQSQGAGQHLYKDLQPFILLRLLMPEETQTQDQPMEEEEVETFAFQAEIAQLMSLIINTFYSNKEIFLRELISNSSDALDKIRYESLTDPSKLDSGKELHINLIPNKQDRTLTIVDTGIGMTKADLINNLGTIAKSGTKAFMEALQAGADISMIGQFGVGFYSAYLVAEKVTVITKHNDDEQYAWESSAGGSFTVRTDTGEPMGRGTKVILHLKEDQTEYLEERRIKEIVKKHSQFIGYPITLFVEKERDKEVSDDEAEEKEDKEEEKEKEEKESEDKPEIEDVGSDEEEEKKDGDKKKKKKIKEKYIDQEELNKTKPIWTRNPDDITNEEYGEFYKSLTNDWEDHLAVKHFSVEGQLEFRALLFVPRRAPFDLFENRKKKNNIKLYVRRVFIMDNCEELIPEYLNFIRGVVDSEDLPLNISREMLQQSKILKVIRKNLVKKCLELFTELAEDKENYKKFYEQFSKNIKLGIHEDSQNRKKLSELLRYYTSASGDEMVSLKDYCTRMKENQKHIYYITGETKDQVANSAFVERLRKHGLEVIYMIEPIDEYCVQQLKEFEGKTLVSVTKEGLELPEDEEEKKKQEEKKTKFENLCKIMKDILEKKVEKVVVSNRLVTSPCCIVTSTYGWTANMERIMKAQALRDNSTMGYMAAKKHLEINPDHSIIETLRQKAEADKNDKSVKDLVILLYETALLSSGFSLEDPQTHANRIYRMIKLGLGIDEDDPTADDTSAAVTEEMPPLEGDDDTSRMEEVD

SEQ ID NO: 34 - protein, 508 aa, Homo Sapiens
MSRFVQDLSKAMSQDGASQFQEVIRQELELSVKKELEKILTTASSHEFEHTKKDLDGFRKLFHRFLQEKGPSVDWGKIQRPPEDSIQPYEKIKARGLPDNISSVLNKLVVVKLNGGLGTSMGCKGPKSLIGVRNENTFLDLTVQQIEHLNKTYNTDVPLVLMNSFNTDEDTKKILQKYNHCRVKIYTFNQSRYPRINKESLLPVAKDVSYSGENTEAWYPPGHGDIYASFYNSGLLDTFIGEGKEYIFVSNIDNLGATVDLYILNHLMNPPNGKRCEFVMEVTNKTRADVKGGTLTQYEGKLRLVEIAQVPKAHVDEFKSVSKFKIFNTNNLWISLAAVKRLQEQNAIDMEIIVNAKTLDGGLNVIQLETAVGAAIKSFENSLGINVPRSRFLPVKTTSDLLLVMSNLYSLNAGSLTMSEKREFPTVPLVKLGSSFTKVQDYLRRFESIPDMLELDHLTVSGDVTFGKNVSLKGTVIIIANHGDRIDIPPGAVLENKIVSGNLRILDH

SEQ ID NO: 35 - protein, 290 aa, Homo Sapiens
MAALRVLLSCVRGPLRPPVRCPAWRPFASGANFEYIIAEKRGKNNTVGLIQLNRPKALNALCDGLIDELNQALKTFEEDPAVGAIVLTGGDKAFAAGADIKEMQNLSFQDCYSSKFLKHWDHLTQVKKPVIAAVNGYAFGGGCELAMMCDIIYAGEKAQFAQPEILIGTIPGAGGTQRLTRAVGKSLAMEMVLTGDRISAQDAKQAGLVSKICPVETLVEEAIQCAEKIASNSKIVVAMAKESVNAAFEMTLTEGSKLEKKLFYSTFATDDRKEGMTAFVEKRKANFKDQ

SEQ ID NO: 36 - protein, 357 aa, Homo sapiens
MAAAAKPNNLSLVVHGPGDLRLENYPIPEPGPNEVLLRMHSVGICGSDVHYWEYGRIGNFIVKKPMVLGHEASGTVEKVGSSVKHLKPGDRVAIEPGAPRENDEFCKMGRYNLSPSIFFCATPPDDGNLCRFYKHNAAFCYKLPDNVTFEEGALIEPLSVGIHACRRGGVTLGHKVLVCGAGPIGMVTLLVAKAMGAAQVVVTDLSATRLSKAKEIGADLVLQISKESPQEIARKVEGQLGCKPEVTIECTGAEASIQAGIYATRSGGNLVLVGLGSEMTTVPLLHAAIREVDIKGVFRYCNTWPVAISMLASKSVNVKPLVTHRFPLEKALEAFETFKKGLGLKIMLKCDPSDQNP

SEQ ID NO: 37 - protein, 430 aa, Homo Sapiens
MALLHSGRVLPGIAAAFHPGLAAAASARASSWWTHVEMGPPDPILGVTEAFKRDTNSKKMNLGVGAYRDDNGKPYVLPSVRKAEAQIAAKNLDKEYLPIGGLAEFCKASAELALGENSEVLKSGRFVTVQTISGTGALRIGASFLQRFFKFSRDVFLPKPTWGNHTPIFRDAGMQLQGYRYYDPKTCGFDFTGAVEDISKIPEQSVLLLHACAHNPTGVDPRPEQWKEIATVVKKRNLFAFFDMAYQGFASGDGDKDAWAVRHFIEQGINVCLCQSYAKNMGLYGERVGAFTMVCKDADEAKRVESQLKILIRPMYSNPPLNGARIAAAILNTPDLRKQWLQEVKVMADRIIGMRTQLVSNLKKEGSTHNWQHITDQIGMFCFTGLKPEQVERLIKEFSIYMTKDGRISVAGVTSSNVGYLAHAIHQVTK

SEQ ID NO: 38 - protein, 175 aa, Homo Sapiens
MSSQIRQNYSTDVEAAVNSLVNLYLQASYTYLSLGFYFDRDDVALEGVSHFFRELAEEKREGYERLLKMQNQRGGRALFQDIKKPAEDEWGKTPDAMKAAMALEKKLNQALLDLHALGSARTDPHLCDFLETHFLDEEVKLIKKMGDHLTNLHRLGGPEAGLGEYLFERLTLKHD

SEQ ID NO: 39 - protein, 322 aa, Homo Sapiens
MSAKSRTIGIIGAPFSKGQPRGGVEEGPTVLRKAGLLEKLKEQECDVKDYGDLPFADIPNDSPFQIVKNPRSVGKASEQLAGKVAEVKKNGRISLVLGGDHSLAIGSISGHARVHPDLGVIWVDAHTDINTPLTTTSGNLHGQPVSFLLKELKGKIPDVPGFSWVTPCISAKDIVYIGLRDVDPGEHYILKTLGIKYFSMTEVDRLGIGKVMEETLSYLLGRKKRPIHLSFDVDGLDPSFTPATGTPVVGGLTYREGLYITEEIYKTGLLSGLDIMEVNPSLGKTPEEVTRTVNTAVAITLACFGLAREGNHKPIDYLNPPK

SEQ ID NO: 40 - protein, 573 aa, Homo Sapiens
MLRLPTVFRQMRPVSRVLAPHLTRAYAKDVKFGADARALMLQGVDLLADAVAVTMGPKGRTVIIEQSWGSPKVTKDGVTVAKSIDLKDKYKNIGAKLVQDVANNTNEEAGDGTTTATVLARSIAKEGFEKISKGANPVEIRRGVMLAVDAVIAELKKQSKPVTTPEEIAQVATISANGDKEIGNIISDAMKKVGRKGVITVKDGKTLNDELEIIEGMKFDRGYISPYFINTSKGQKCEFQDAYVLLSEKKISSIQSIVPALEIANAHRKPLVIIAEDVDGEALSTLVLNRLKVGLQVVAVKAPGFGDNRKNQLKDMAIATGGAVFGEEGLTLNLEDVQPHDLGKVGEVIVTKDDAMLLKGKGDKAQIEKRIQEIIEQLDVTTSEYEKEKLNERLAKLSDGVAVLKVGGTSDVEVNEKKDRVTDALNATRAAVEEGIVLGGGCALLRCIPALDSLTPANEDQKIGIEIIKRTLKIPAMTIAKNAGVEGSLIVEKIMQSSSEVGYDAMAGDFVNMVEKGIIDPTKVVRTALLDAAGVASLLTTAEVVVTEIPKEEKDPGMGAMGGMGGGMGGGMF

SEQ ID NO: 41 - protein, 98 aa, Homo Sapiens
MAEQSDEAVKYYTLEEIQKHNHSKSTWLILHHKVYDLTKFLEEHPGGEEVLREQAGGDATENFEDVGHSTDAREMSKTFIIGELHPDDRPKLNKPPEP

SEQ ID NO: 42 - protein, 102 aa, Homo Sapiens
MAGQAFRKFLPLFDRVLVERSAAETVTKGGIMLPEKSQGKVLQATVVAVGSGSKGKGGEIQPVSVKVGDKVLLPEYGGTKVVLDDKDYFLFRDGDILGKYVD

SEQ ID NO: 43 - protein, 505 aa, Homo Sapiens
MRLRRLALFPGVALLLAAARLAAASDVLELTDDNFESRISDTGSAGLMLVEFFAPWCGHCKRLAPEYEAAATRLKGIVPLAKVDCTANTNTCNKYGVSGYPTLKIFRDGEEAGAYDGPRTADGIVSHLKKQAGPASVPLRTEEEFKKFISDKDASIVGFFDDSFSEAHSEFLKAASNLRDNYRFAHTNVESLVNEYDDNGEGIILFRPSHLTNKFEDKTVAYTEQKMTSGKIKKFIQENIFGICPHMTEDNKDLIQGKDLLIAYYDVDYEKNAKGSNYWRNRVMMVAKKFLDAGHKLNFAVASRKTFSHELSDFGLESTAGEIPVVAIRTAKGEKFVMQEEFSRDGKALERFLQDYFDGNLKRYLKSEPIPESNDGPVKVVVAENFDEIVNNENKDVLIEFYAPWCGHCKNLEPKYKELGEKLSKDPNIVIAKMDATANDVPSPYEVRGFPTIYFSPANKKLNPKKYEGGRELSDFISYLQREATNPPVIQEEKPKKKKKAQEDL

SEQ ID NO: 44 - protein, 736 aa, Homo Sapiens
MGSPLRFDGRVVLVTGAGAGLGRAYALAFAERGALVVVNDLGGDFKGVGKGSLAADKVVEEIRRRGGKAVANYDSVEEGEKVVKTALDAFGRIDVVVNNAGILRDRSFARISDEDWDIIHRVHLRGSFQVTRAAWEHMKKQKYGRIIMTSSASGIYGNFGQANYSAAKLGLLGLANSLAIEGRKSNIHCNTIAPNAGSRMTQTVMPEDLVEALKPEYVAPLVLWLCHESCEENGGLFEVGAGWIGKLRWERTLGAIVRQKNHPMTPEAVKANWKKICDFENASKPQSIQESTGSIIEVLSKIDSEGGVSANHTSRATSTATSGFAGAIGQKLPPFSYAYTELEAIMYALGVGASIKDPKDLKFIYEGSSDFSCLPTFGVIIGQKSMMGGGLAEIPGLSINFAKVLHGEQYLELYKPLPRAGKLKCEAVVADVLDKGSGVVIIMDVYSYSEKELICHNQFSLFLVGSGGFGGKRTSDKVKVAVAIPNRPPDAVLTDTTSLNQAALYRLSGDWNPLHIDPNFASLAGFDKPILHGLCTFGFSARRVLQQFADNDVSRFKAIKARFAKPVYPGQTLQTEMWKEGNRIHFQTKVQETGDIVISNAYVDLAPTSGTSAKTPSEGGKLQSTFVFEEIGRRLKDIGPEVVKKVNAVFEWHITKGGNIGAKWTIDLKSGSGKVYQGPAKGAADTTIILSDEDFMEVVLGKLDPQKAFFSGRLKARGNIMLSQKLQMILKDYAKL

SEQ ID NO: 45 - protein, 529 aa, Homo Sapiens
MLGFVGRVAAAPASGALRRLTPSASLPPAQLLLRAAPTAVHPVRDYAAQTSPSPKAGAATGRIVAVIGAVVDVQFDEGLPPILNALEVQGRETRLVLEVAQHLGESTVRTIAMDGTEGLVRGQKVLDSGAPIKIPVGPETLGRIMNVIGEPIDERGPIKTKQFAPIHAEAPEFMEMSVEQEILVTGIKVVDLLAPYAKGGKIGLFGGAGVGKTVLIMELINNVAKAHGGYSVFAGVGERTREGNDLYHEMIESGVINLKDATSKVALVYGQMNEPPGARARVALTGLTVAEYFRDQEGQDVLLFIDNIFRFTQAGSEVSALLGRIPSAVGYQPTLATDMGTMQERITTTKKGSITSVQAIYVPADDLTDPAPATTFAHLDATTVLSRAIAELGIYPAVDPLDSTSRIMDPNIVGSEHYDVARGVQKILQDYKSLQDIIAILGMDELSEEDKLTVSRARKIQRFLSQPFQVAEVFTGHMGKLVPLKETIKGFQQILAGEYDHLPEQAFYMVGPIEEAVAKADKLAEEHSS

SEQ ID NO: 46 - protein, 527 aa, Homo Sapiens
MADSRDPASDQMQHWKEQRAAQKADVLTTGAGNPVGDKLNVITVGPRGPLLVQDVVFTDEMAHFDRERIPERVVHAKGAGAFGYFEVTHDITKYSKAKVFEHIGKKTPIAVRFSTVAGESGSADTVRDPRGFAVKFYTEDGNWDLVGNNTPIFFIRDPILFPSFIHSQKRNPQTHLKDPDMVWDFWSLRPESLHQVSFLFSDRGIPDGHRHMNGYGSHTFKLVNANGEAVYCKFHYKTDQGIKNLSVEDAARLSQEDPDYGIRDLFNAIATGKYPSWTFYIQVMTFNQAETFPFNPFDLTKVWPHKDYPLIPVGKLVLNRNPVNYFAEVEQIAFDPSNMPPGIEASPDKMLQGRLFAYPDTHRHRLGPNYLHIPVNCPYRARVANYQRDGPMCMQDNQGGAPNYYPNSFGAPEQQPSALEHSIQYSGEVRRFNTANDDNVTQVRAFYVNVLNEEQRKRLCENIAGHLKDAQIFIQKKAVKNFTEVHPDYGSHIQALLDKYNAEKPKNAIHTFVQSGSHLAAREKANL

SEQ ID NO: 47 - protein, 338 aa, Homo Sapiens [sequence omitted]

SEQ ID NO: 48 - protein, 563 aa, Homo Sapiens
MLLPAPALRRALLSRPWTGAGLRWKHTSSLKVANEPVLAFTQGSPERDALQKALKDLKGRMEAIPCVVGDEEVWTSDVQYQVSPFNHGHKVAKFCYADKSLLNKAIEAALAARKEWDLKPIADRAQIFLKAADMLSGPRRAEILAKTMVGQGKTVIQAEIDAAAELIDFFRFNAKYAVELEGQQPISVPPSTNSTVYRGLEGFVAAISPFNFTAIGGNLAGAPALMGNVVLWKPSDTAMLASYAVYRILREAGLPPNIIQFVPADGPLFGDTVTSSEHLCGINFTGSVPTFKHLWKQVAQNLDRFHTFPRLAGECGGKNFHFVHRSADVESVVSGTLRSAFEYGGQKCSACSRLYVPHSLWPQIKGRLLEEHSRIKVGDPAEDFGTFFSAVIDAKSFARIKKWLEHARSSPSLTILAGGKCDDSVGYFVEPCIVESKDPQEPIMKEEIFGPVLSVYVYPDDKYKETLQLVDSTTSYGLTGAVFSQDKDVVQEATKVLRNAAGNFYINDKSTGSIVGQQPFGGARASGTNDKPGGPHYILRWTSPQVIKETHKPLGDWSYAYMQ

SEQ ID NO: 49 - protein, 640 aa, Homo Sapiens
MAALYRPGLRLNWHGLSPLGWPSCRSIQTLRVLSGDLGQLPTGIRDFVEHSARLCQPEGIHICDGTEAENTATLTLLEQQGLIRKLPKYNNCWLARTDPKDVARVESKTVIVTPSQRDTVQLPPGGARGQLGNWMSPADFQRAVDERFPGCMQGRTMYVLPFSMGPVGSPLSRIGVQLTDSAYVVASMRIMTRLGTPVLQALGDGDFVKCLHSVGQPLTGQGEPVSQWPCNPEKTLIGHVPDQREIISFGSGYGGNSLLGKKCFALRIASRLARDEGWLAEHMLILGITSPAGKKRYVAAAFPSACGKTNLAMMRPALPGWKVECVGDDIAWMRFDSEGRLRAINPENGFFGVAPGTSATTNPNAMATIQSNTIFTNVAETSDGGVYWEGIDQPLPPGVTVTSWLGKPWKPGDKEPCAHPNSRFCAPARQCPIMDPAWEAPEGVPIDAIIFGGRRPKGVPLVYEAFNWRHGVFVGSAMRSESTAAAEHKGKIIMHDPFAMRPFFGYNFGHYLEHWLSMEGRKGAQLPRIFHVNWFRRDEAGHFLWPGFGENARVLDWICRRLEGEDSARETPIGLVPKEGALDLSGLRAIDTTQLFSLPKDFWEQEVRDIRSYLTEQVNQDLPKEVLAELEALERRVHKM

SEQ ID NO: 50 - protein, 393 aa, Homo Sapiens
MTTYSDKGAKPERGRFLHFHSVTFWVGNAKQAASFYCSKMGFEPLAYRGLETGSREVVSHVIKQGKIVFVLSSALNPWNKEMGDHLVKHGDGVKDIAFEVEDCDYIVQKARERGAKIMREPWVEQDKFGKVKFAVLQTYGDTTHTLVEKMNYIGQFLPGYEAPAFMDPLLPKLPKCSLEMIDHIVGNQPDQEMVSASEWYLKNLQFHRFWSVDDTQVHTEYSSLRSIVVANYEESIKMPINEPAPGKKKSQIQEYVDYNGGAGVQHIALKTEDIITAIRHLRERGLEFLSVPSTYYKQLREKLKTAKIKVKENIDALEELKILVDYDEKGYLLQIFTKPVQDRPTLFLEVIQRHNHQGFGAGNFNSLFKAFEEEQNLRGNLTNMETNGVVPGM

SEQ ID NO: 51 - protein, 326 aa, Homo Sapiens
MDLSAASHRIPLSDGNSIPIIGLGTYSEPKSTPKGACATSVKVAIDTGYRHIDGAYIYQNEHEVGEAIREKIAEGKVRREDIFYCGKLWATNHVPEMVRPTLERTLRVLQLDYVDLYIIEVPMAFKPGDEIYPRDENGKWLYHKSNLCATWEAMEACKDAGLVKSLGVSNFNRRQLELILNKPGLKHKPVSNQVECHPYFTQPKLLKFCQQHDIVITAYSPLGTSRNPIWVNVSSPPLLKDALLNSLGKRYNKTAAQIVLRFNIQRGVVVIPKSFNLERIKENFQIFDFSLTEEEMKDIEALNKNVRFVELLMWRDHPEYPFHDEY

SEQ ID NO: 52 - protein, 450 aa, Homo Sapiens
MRECISIHVGQAGVQIGNACWELYCLEHGIQPDGQMPSDKTIGGGDDSFNTFFSETGAGKHVPRAVFVDLEPTVVDEVRTGTYRQLFHPEQLITGKEDAANNYARGHYTIGKEIVDLVLDRIRKLADLCTGLQGFLIFHSFGGGTGSGFASLLMERLSVDYGKKSKLEFAIYPAPQVSTAVVEPYNSILTTHTTLEHSDCAFMVDNEAIYDICRRNLDIERPTYTNLNRLIGQIVSSITASLRFDGALNVDLTEFQTNLVPYPRIHFPLATYAPVISAEKAYHEQLSVAEITNACFEPANQMVKCDPRHGKYMACCMLYRGDVVPKDVNAAIATIKTKRTIQFVDWCPTGFKVGINYQPPTVVPGGDLAKVQRAVCMLSNTTAIAEAWARLDHKFDLMYAKRAFVHWYVGEGMEEGEFSEAREDLAALEKDYEEVGVDSVEAEAEEGEEY

SEQ ID NO: 53 - protein, 328 aa, Homo Sapiens
MRPVRLMKVFVTRRIPAEGRVALARAADCEVEQWDSDEPIPAKELERGVAGAHGLLCLLSDHVDKRILDAAGANLKVISTMSVGIDHLALDEIKKRGIRVGYTPDVLTDTTAELAVSLLLTTCRRLPEAIEEVKNGGWTSWKPLWLCGYGLTQSTVGIIGLGRIGQAIARRLKPFGVQRFLYTGRQPRPEEAAEFQAEFVSTPELAAQSDFIVVACSLTPATEGLCNKDFFQKMKETAVFINISRGDVVNQDDLYQALASGKIAAAGLDVTSPEPLPTNHPLLTLKNCVILPHIGSATHRTRNTMSLLAANNLLAGLRGEPMPSELKL

SEQ ID NO: 54 - protein, 332 aa, Homo Sapiens
MATLKDQLIYNLLKEEQTPQNKITVVGVGAVGMACAISILMKDLADELALVDVIEDKLKGEMMDLQHGSLFLRTPKIVSGKDYNVTANSKLVIITAGARQQEGESRLNLVQRNVNIFKFIIPNVVKYSPNCKLLIVSNPVDILTYVAWKISGFPKNRVIGSGCNLDSARFRYLMGERLGVHPLSCHGWVLGEHGDSSVPVWSGMNVAGVSLKTLHPDLGTDKDKEQWKEVHKQVVESAYEVIKLKGYTSWAIGLSVADLAESIMKNLRRVHPVSTMIKGLYGIKDDVFLSVPCILGQNGISDLVKVTLTSEEEARLKKSADTLWGIQKELQF

SEQ ID NO: 55 - protein, 298 aa, Homo Sapiens
MGDHAWSFLKDFLAGGVAAAVSKTAVAPIERVKLLLQVQHASKQISAEKQYKGIIDCVVRIPKEQGFLSFWRGNLANVIRYFPTQALNFAFKDKYKQLFLGGVDRHKQFWRYFAGNLASGGAAGATSLCFVYPLDFARTRLAADVGKGAAQREFHGLGDCIIKIFKSDGLRGLYQGFNVSVQGIIIYRAAYFGVYDTAKGMLPDPKNVHIFVSWMIAQSVTAVAGLVSYPFDTVRRRMMMQSGRKGADIMYTGTVDCWRKIAKDEGAKAFFKGAWSNVLRGMGGAFVLVLYDEIKKYV

SEQ ID NO: 56 - protein, 529 aa, Homo Sapiens
MSVKWTSVILLIQLSFCFSSGNCGKVLVWAAEYSHWMNIKTILDELIQRGHEVTVLASSASILFDPNNSSALKIEIYPTSLTKTELENFIMQQIKRWSDLPKDTFWLYFSQVQEIMSIFGDITRKFCKDVVSNKKFMKKVQESRFDVIFADAIFPCSELLAELFNIPFVYSLSFSPGYTFEKHSGGFIFPPSYVPVVMSELTDQMTFMERVKNMIYVLYFDFWFEIFDMKKWDQFYSEVLGRPTTLSETMGKADVWLIRNSWNFQFPHPLLPNVDFVGGLHCKPAKPLPKEMEDFVQSSGENGVVVFSLGSMVSNMTEERANVIASALAQIPQKVLWRFDGNKPDTLGLNTRLYKWIPQNDLLGHPKTRAFITHGGANGIYEAIYHGIPMVGIPLFADQPDNIAHMKARGAAVRVDFNTMSSTDLLNALKRVINDPSYKENVMKLSRIQHDQPVKPLDRAVFWIEFVMRHKGAKHLRVAAHDLTWFQYHSLDVIGFLLVCVATVIFIVTKCCLFCFWKFARKAKKGKND

SEQ ID NO: 57 - protein, 419 aa, Homo Sapiens
MSFIPVAEDSDFPIHNLPYGVFSTRGDPRPRIGVAIGDQILDLSIIKHLFTGPVLSKHQDVFNQPTLNSFMGLGQAAWKEARVFLQNLLSVSQARLRDDTELRKCAFISQASATMHLPATIGDYTDFYSSRQHATNVGIMFRDKENALMPNWLHLPVGYHGRASSVVVSGTPIRRPMGQMKPDDSKPPVYGACKLLDMELEMAFFVGPGNRLGEPIPISKAHEHIFGMVLMNDWSARDIQKWEYVPLGPFLGKSFGTTVSPWVVPMDALMPFAVPNPKQDPRPLPYLCHDEPYTFDINLSVNLKGEGMSQAATICKSNFKYMYWTMLQQLTHHSVNGCNLRPGDLLASGTISGPEPENFGSMLELSWKGTKPIDLGNGQTRKFLLDGDEVIITGYCQGDGYRIGFGQCAGKVLPALLPS

SEQ ID NO: 58 - protein, 698 aa, Homo Sapiens
MQAHELFRYFRMPELVDFRQYVRTLPTNTLMGFGAFAALTTFWYATRPKPLKPPCDLSMQSVEVAGSGGARRSALLDSDEPLVYFYDDVTTLYEGFQRGIQVSNNGPCLGSRKPDQPYEWLSYKQVAELSECIGSALIQKGFKTAPDQFIGIFAQNRPEWVIIEQGCFAYSMVIVPLYDTLGNEAITYIVNKAELSLVFVDKPEKAKLLLEGVENKLIPGLKIIVVMDAYGSELVERGQRCGVEVTSMKAMEDLGRANRRKPKPPAPEDLAVICFTSGTTGNPKGAMVTHRNIVSDCSAFVKATENTVNPCPDDTLISFLPLAHMFERVVECVMLCHGAKIGFFQGDIRLLMDDLKVLQPTVFPVVPRLLNRMFDRIFGQANTTLKRWLLDFASKRKEAELRSGIIRNNSLWDRLIFHKVQSSLGGRVRLMVTGAAPVSATVLTFLRAALGCQFYEGYGQTECTAGCCLTMPGDWTAGHVGAPMPCNLIKLVDVEEMNYMAAEGEGEVCVKGPNVFQGYLKDPAKTAEALDKDGWLHTGDIGKWLPNGTLKIIDRKKHIFKLAQGEYIAPEKIENIYMRSEPVAQVFVHGESLQAFLIAIVVPDVETLCSWAQKRGFEGSFEELCRNKDVKKAILEDMVRLGKDSGLKPFEQVKGITLHPELFSIDNGLLTPTMKAKRPELRNYFRSQIDDLYSTIKV

SEQ ID NO: 59 - protein, 283 aa, Homo Sapiens
MAVPPTYADLGKSARDVFTKGYGFGLIKLDLKTKSENGLEFTSSGSANTETTKVTGSLETKYRWTEYGLTFTEKWNTDNTLGTEITVEDQLARGLKLTFDSSFSPNTGKKNAKIKTGYKREHINLGCDMDFDIAGPSIRGALVLGYEGWLAGYQMNFETAKSRVTQSNFAVGYKTDEFQLHTNVNDGTEFGGSIYQKVNKKLETAVNLAWTAGNSNTRFGIAAKYQIDPDACFSAKVNNSSLIGLGYTQTLKPGIKLTLSALLDGKNVNAGGHKLGLGLEFQA

SEQ ID NO: 60 - protein, 472 aa, Homo Sapiens
MATKCGNCGPGYSTPLEAMKGPREEIVYLPCIYRNTGTEAPDYLATVDVDPKSPQYCQVIHRLPMPNLKDELHHSGWNTCSSCFGDSTKSRTKLVLPSLISSRIYVVDVGSEPRAPKLHKVIEPKDIHAKCELAFLHTSHCLASGEVMISSLGDVKGNGKGGFVLLDGETFEVKGTWERPGGAAPLGYDFWYQPRHNVMISTEWAAPNVLRDGFNPADVEAGLYGSHLYVWDWQRHEIVQTLSLKDGLIPLEIRFLHNPDAAQGFVGCALSSTIQRFYKNEGGTWSVEKVIQVPPKKVKGWLLPEMPGLITDILLSLDDRFLYFSNWLHGDLRQYDISDPQRPRLTGQLFLGGSIVKGGPVQVLEDEELKSQPEPLVVKGKRVAGGPQMIQLSLDGKRLYITTSLYSAWDKQFYPDLIREGSVMLQVDVDTVKGGLKLNPNFLVDFGKEPLGPALAHELRYPGGDCSSDIWI

SEQ ID NO: 61 - protein, 426 aa, Homo Sapiens
MFWEVISDEHGIDPTGTYHGDSDLQLDRISVYYNEATGGKYVPRAILVDLEPGTMDSVRSGPFGQIFRPDNFVFGQSGAGNNWAKGHYTEGAELVDSVLDVVRKEAESCDCLQGFQLTHSLGGGTGSGMGTLLISKIREEYPDRIMNTFSVVPSPKVSDTVVEPYNATLSVHQLVENTDETYCIDNEALYDICFRTLKLTTPTYGDLNHLVSATMSGVTTCLRFPGQLNADLRKLAVNMVPFPRLHFFMPGFAPLTSRGSQQYRALTVPELTQQVFDAKNMMAACDPRHGRYLTVAAVFRGRMSMKEVDEQMLNVQNKNSSYFVEWIPNNVKTAVCDIPPRGLKMAVTFIGNSTAIQELFKRISEQFTAMFRRKAFLHWYTGEGMDEMEFTEAESNMNDLVSEYQQYQDATAEEEEDFGEEAEEEA

SEQ ID NO: 62 - protein, 285 aa, Homo Sapiens
MSDDFLWFEGIAFPTMGFRSETLRKVRDEFVIRDEDVIILTYPKSGTNWLAEILCLMHSKGDAKWIQSVPIWERSPWVESEIGYTALSETESPRLFSSHLPIQLFPKSFFSSKAKVIYLMRNPRDVLVSGYFFWKNMKFIKKPKSWEEYFEWFCQGTVLYGSWFDHIHGWMPMREEKNFLLLSYEELKQDTGRTIEKICQFLGKTLEPEELNLILKNSSFQSMKENKMSNYSLLSVDYVVDKAQLLRKGVSGDWKNHFTVAQAEDFDKLFQEKMADLPRELFPWE

SEQ ID NO: 63 - protein, 205 aa, Homo Sapiens
MTERRVPFSLLRGPSWDPFRDWYPHSRLFDQAFGLPRLPEEWSQWLGGSSWPGYVRPLPPAAIESPAVAAPAYSRALSRQLSSGVSEIRHTADRWRVSLDVNHFAPDELTVKTKDGVVEITGKHEERQDEHGYISRCFTRKYTLPPGVDPTQVSSSLSPEGTLTVEAPMPKLATQSNEITIPVTFESRAQLGGPEAAKSDETAAK

SEQ ID NO: 64 - protein, 645 aa, Homo Sapiens
MRPRKAFLLLLLLGLVQLLAVAGAEGPDEDSSNRENAIEDEEEEEEEDDDEEEDDLEVKEENGVLVLNDANFDNFVADKDTVLLEFYAPWCGHCKQFAPEYEKIANILKDKDPPIPVAKIDATSASVLASRFDVSGYPTIKILKKGQAVDYEGSRTQEEIVAKVREVSQPDWTPPPEVTLVLTKENFDEVVNDADIILVEFYAPWCGHCKKLAPEYEKAAKELSKRSPPIPLAKVDATAETDLAKRFDVSGYPTLKIFRKGRPYDYNGPREKYGIVDYMIEQSGPPSKEILTLKQVQEFLKDGDDVIIIGVFKGESDPAYQQYQDAANNLREDYKFHHTFSTEIAKFLKVSQGQLVVMQPEKFQSKYEPRSHMMDVQGSTQDSAIKDFVLKYALPLVGHRKVSNDAKRYTRRPLVVVYYSVDFSFDYRAATQFWRSKVLEVAKDFPEYTFAIADEEDYAGEVKDLGLSESGEDVNAAILDESGKKFAMEPEEFDSDTLREFVTAFKKGKLKPVIKSQPVPKNNKGPVKVVVGKTFDSIVMDPKKDVLIEFYAPWCGHCKQLEPVYNSLAKKYKGQKGLVIAKMDATANDVPSDRYKVEGFPTIYFAPSGDKKNPVKFEGGDRDLEHLSKFIEEHATKLSRTKEEL

SEQ ID NO: 65 - protein, 535 aa, Homo Sapiens
MAALLAAAAVRARILQVSSKVKSSPTWYSASSFSSSVPTVKLFIGGKFVESKSDKWIDIHNPATNEVIGRVPQATKAEMDAAIASCKRAFPAWADTSVLSRQQVLLRYQQLIKENLKEIAKLITLEQGKTLADAEGDVFRGLQVVEHACSVTSLMMGETMPSITKDMDLYSYRLPLGVCAGIAPFNFPAMIPLWMFPMAMVCGNTFLMKPSERVPGATMLLAKLLQDSGAPDGTLNIIHGQHEAVNFICDHPDIKAISFVGSNKAGEYIFERGSRHGKRVQANMGAKNHGVVMPDANKENTLNQLVGAAFGAAGQRCMALSTAVLVGEAKKWLPELVEHAKNLRVNAGDQPGADLGPLITPQAKERVCNLIDSGTKEGASILLDGRKIKVKGYENGNFVGPTIISNVKPNMTCYKEEIFGPVLVVLETETLDEAIQIVNNNPYGNGTAIFTTNGATARKYAHLVDVGQVGVNVPIPVPLPMFSFTGSRSSFRGDTNFYGKQGIQFYTQLKTITSQWKEEDATLSSPAVVMPTMGR

SEQ ID NO: 66 - protein, 123 aa, Homo Sapiens
SDVLELTDDNFESRISDTGSAGLMLVEFFAPWCGHCKRLAPEYEAAATRLKGIVPLAKVDCTANTNTCNKYGVSGYPTLKIFRDGEEAGAYDGPRTAGVSSYFVLHISLTSLRTRLWHIQSKK

SEQ ID NO: 67 - protein, 165 aa, Homo Sapiens
MVNPTVFFDIAVDGEPLGRVSFELFADKVPKTAENFRALSTGEKGFGYKGSCFHRIIPGFMCQGGDFTRHNGTGGKSIYGEKFEDENFILKHTGPGILSMANAGPNTNGSQFFICTAKTEWLDGKHVVFGKVKEGMNIVEAMERFGSRNGKTSKKITIADCGQLE

SEQ ID NO: 68 - protein, 357 aa, Homo Sapiens
MGRQLAGCGDAGKKASFKMSTVHEILCKLSLEGDHSTPPSAYGSVKAYTNFDAERDALNIETAIKTKGVDEVTIVNILTNRSNAQRQDIAFAYQRRTKKELASALKSALSGHLETVILGLLKTPAQYDASELKASMKGLGTDEDSLIEIICSRTNQELQEINRVYKEMYKTDLEKDIISDTSGDFRKLMVALAKGRRAEDGSVIDYELIDQDARDLYDAGVKRKGTDVPKWISIMTERSVPHLQKVFDRYKSYSPYDMLESIRKEVKGDLENAFLNLVQCIQNKPLYFADRLYDSMKGKGTRDKVLIRIMVSRSEVDMLKIRSEFKRKYGKSLYYYIQQDTKGDYQKALLYLCGGDD

SEQ ID NO: 69 - protein, 541 aa, Homo Sapiens
MSQLVECVPNFSEGKNQEVIDAISGAITQTPGCVLLDVDAGPSTNRTVYTFVGPPECVVEGALNAARVASRLIDMSRHQGEHPRMGALDVCPFIPVRGVSVDECVLCAQAFGQRLAEELDVPVYLYGEAARMDSRRTLPAIRAGEYEALPKKLQQADWAPDFGPSSFVPSWGATATGARKFLIAFNINLLGTKEQAHRIALNLREQGRGKDQPGRLKKVQGIGWYLDEKNLAQVSTNLLDFEVTALHTVYEETCREAQELSLPVVGSQLVGLVPLKALLDAAAFYCEKENLFILEEEQRIRLVVSRLGLDSLCPFSPKERIIEYLVPERGPERGLGSKSLRAFVGEVGARSAAPGGGSVAAAAAAMGAALGSMVGLMTYGRRQFQSLDTTMRRLIPPFREASAKLTTLVDADAEAFTAYLEAMRLPKNTPEEKDRRTAALQEGLRRAVSVPLTLAETVASLWPALQELARCGNLACRSDLQVAAKALEMGVFGAYFNVLINLRDITDEAFKDQIHHRVSSLLQEAKTQAALVLDCLETRQE

SEQ ID NO: 70 - protein, 532 aa, Homo Sapiens
MGKKVAIIGAGVSGLASIRSCLEEGLEPTCFEKSNDIGGLWKFSDHAEEGRASIYKSVFSNSSKEMMCFPDFPFPDDFPNFMHNSKIQEYIIAFAKEKNLLKYIQFKTFVSSVNKHPDFATTGQWDVTTERDGKKESAVFDAVMVCSGHHVYPNLPKESFPGLNHFKGKCFHSRDYKEPGVFNGKRVLVVGLGNSGCDIATELSRTAEQVMISSRSGSWVMSRVWDNGYPWDMLLVTRFGTFLKNNLPTAISDWLYVKQMNARFKHENYGLMPLNGVLRKEPVFNDELPASILCGIVSVKPNVKEFTETSAIFEDGTIFEGIDCVIFATGYSFAYPFLDESIIKSRNNEIILFKGVFPPLLEKSTIAVIGFVQSLGAAIPTVDLQSRWAAQVIKGTCTLPSMEDMMNDINEKMEKKRKWFGKSETIQTDYIVYMDELSSFIGAKPNIPWLFLTDPKLAMEVYFGPCSPYQFRLVGPGQWPGARNAILTQWDRSLKPMQTRVVGRLQKPCFFFHWLKLFAIPILLIAVFLVLT

SEQ ID NO: 71 - protein, 216 aa, Homo Sapiens
MLRLSERNMKVLLAAALIAGSVFFLLLPGPSAADEKKKGPKVTVKVYFDLRIGDEDVGRVIFGLFGKTVPKTVDNFVALATGEKGFGYKNSKFHRVIKDFMIQGGDFTRGDGTGGKSIYGERFPDENFKLKHYGPGWVSMANAGKDTNGSQFFITTVKTAWLDGKHVVFGKVLEGMEVVRKVESTKTDSRDKPLKDVIIADCGKIEVEKPFAIAKE

SEQ ID NO: 72 - protein, 763 aa, Homo Sapiens
MVACRAIGILSRFSAFRILRSRGYICRNFTGSSALLTRTHINYGVKGDVAVVRINSPNSKVNTLSKELHSEFSEVMNEIWASDQIRSAVLISSKPGCFIAGADINMLAACKTLQEVTQLSQEAQRIVEKLEKSTKPIVAAINGSCLGGGLEVAISCQYRIATKDRKTVLGTPEVLLGALPGAGGTQRLPKMVGVPAALDMMLTGRSIRADRAKKMGLVDQLVEPLGPGLKPPEERTIEYLEEVAITFAKGLADKKISPKRDKGLVEKLTAYAMTIPFVRQQVYKKVEEKVRKQTKGLYPAPLKIIDVVKTGIEQGSDAGYLCESQKFGELVMTKESKALMGLYHGQVLCKKNKFGAPQKDVKHLAILGAGLMGAGIAQVSVDKGLKTILKDATLTALDRGQQQVFKGLNDKVKKKALTSFERDSIFSNLTGQLDYQGFEKADMVIEAVFEDLSLKHRVLKEVEAVIPDHCIFASNTSALPISEIAAVSKRPEKVIGMHYFSPVDKMQLLEIITTEKTSKDTSASAVAVGLKQGKVIIVVKDGPGFYTTRCLAPMMSEVIRILQEGVDPKKLDSLTTSFGFPVGAATLVDEVGVDVAKHVAEDLGKVFGERFGGGNPELLTQMVSKGFLGRKSGKGFYIYQEGVKRKDLNSDMDSILASLKLPPKSEVSSDEDIQFRLVTRFVNEAVMCLQEGILATPAEGDIGAVFGLGFPPCLGGPFRFVDLYGAQKIVDRLKKYEAAYGKQFTPCQLLADHANSPNKKFYQ

SEQ ID NO: 73 - protein, 260 aa, Homo Sapiens
MSHHWGYGKHNGPEHWHKDFPIAKGERQSPVDIDTHTAKYDPSLKPLSVSYDQATSLRILNNGHAFNVEFDDSQDKAVLKGGPLDGTYRLIQFHFHWGSLDGQGSEHTVDKKKYAAELHLVHWNTKYGDFGKAVQQPDGLAVLGIFLKVGSAKPGLQKVVDVLDSIKTKGKSADFTNFDPRGLLPESLDYWTYPGSLTTPPLLECVTWIVLKEPISVSSEQVLKFRKLNFNGEGEPEELMVDNWRPAQPLKNRQIKASFK

SEQ ID NO: 74 - protein, 894 aa, Homo Sapiens
MILLAVLFLCFISSYSASVKGHTTGLSLNNDRLYKLTYSTEVLLDRGKGKLQDSVGYRISSNVDVALLWRNPDGDDDQLIQITMKDVNVENVNQQRGEKSIFKGKSPSKIMGKENLEALQRPTLLHLIHGKVKEFYSYQNEAVAIENIKRGLASLFQTQLSSGTTNEVDISGNCKVTYQAHQDKVIKIKALDSCKIARSGFTTPNQVLGVSSKATSVTTYKIEDSFVIAVLAEETHNFGLNFLQTIKGKIVSKQKLELKTTEAGPRLMSGKQAAAIIKAVDSKYTAIPIVGQVFQSHCKGCPSLSELWRSTRKYLQPDNLSKAEAVRNFLAFIQHLRTAKKEEILQILKMENKEVLPQLVDAVTSAQTSDSLEAILDFLDFKSDSSIILQERFLYACGFASHPNEELLRALISKFKGSIGSSDIRETVMIITGTLVRKLCQNEGCKLKAVVEAKKLILGGLEKAEKKEDTRMYLLALKNALLPEGIPSLLKYAEAGEGPISHLATTALQRYDLPFITDEVKKTLNRIYHQNRKVHEKTVRTAAAAIILNNNPSYMDVKNILLSIGELPQEMNKYMLAIVQDILRFEMPASKIVRRVLKEMVAHNYDRFSRSGSSSAYTGYIERSPRSASTYSLDILYSGSGILRRSNLNIFQYIGKAGLHGSQVVIEAQGLEALIAATPDEGEENLDSYAGMSAILFDVQLRPVTFFNGYSDLMSKMLSASGDPISVVKGLILLIDHSQELQLQSGLKANIEVQGGLAIDISGAMEFSLWYRESKTRVKNRVTVVITTDITVDSSFVKAGLETSTETEAGLEFISTVQFSQYPFLVCMQMDKDEAPFRQFEKKYERLSTGRGYVSQKRKESVLAGCEFPLHQENSEMCKVVFAPQPDSTSSGWF

SEQ ID NO: 75 - protein, 353 aa, Homo Sapiens
MEKTLETVPLERKKREKEQFRKLFIGGLSFETTEESLRNYYEQWGKLTDCVVMRDPASKRSRGFGFVTFSSMAEVDAAMAARPHSIDGRVVEPKRAVAREESGKPGAHVTVKKLFVGGIKEDTEEHHLRDYFEEYGKIDTIEIITDRQSGKKRGFGFVTFDDHDPVDKIVLQKYHTINGHNAEVRKALSRQEMQEVQSSRSGRGGNFGFGDSRGGGGNFGPGPGSNFRGGSDGYGSGRGFGDGYNGYGGGPGGGNFGGSPGYGGGRGGYGGGGPGYGNQGGGYGGGYDNYGGGNYGSGNYNDFGNYNQQPSNYGPMKSGNFGGSRNMGGPYGGGNYGPGGSGGSGGYGGRSRY

SEQ ID NO: 76 - protein, 508 aa, Homo Sapiens
MLRRALLCLAVAALVRADAPEEEDHVLVLRKSNFAEALAAHKYLLVEFYAPWCGHCKALAPEYAKAAGKLKAEGSEIRLAKVDATEESDLAQQYGVRGYPTIKFFRNGDTASPKEYTAGREADDIVNWLKKRTGPAATTLPDGAAAESLVESSEVAVIGFFKDVESDSAKQFLQAAEAIDDIPFGITSNSDVFSKYQLDKDGVVLFKKFDEGRNNFEGEVTKENLLDFIKHNQLPLVIEFTEQTAPKIFGGEIKTHILLFLPKSVSDYDGKLSNFKTAAESFKGKILFIFIDSDHTDNQRILEFFGLKKEECPAVRLITLEEEMTKYKPESEELTAERITEFCHRFLEGKIKPHLMSQELPEDWDKQPVKVLVGKNFEDVAFDEKKNVFVEFYAPWCGHCKQLAPIWDKLGETYKDHENIVIAKMDSTANEVEAVKVHSFPTLKFFPASADRTVIDYNGERTLDGFKKFLESGGQDGAGDDDDLEDLEEAEEPDMEEDDDQKAVKDEL

SEQ ID NO: 77 - protein, 683 aa, Homo Sapiens
MLFIFNFLFSPLPTPALICILTFGAAIFLWLITRPQPVLPLLDLNNQSVGIEGGARKGVSQKNNDLTSCCFSDAKTMYEVFQRGLAVSDNGPCLGYRKPNQPYRWLSYKQVSDRAEYLGSCLLHKGYKSSPDQFVGIFAQNRPEWIISELACYTYSMVAVPLYDTLGPEAIVHIVNKADIAMVICDTPQKALVLIGNVEKGFTPSLKVIILMDPFDDDLKQRGEKSGIEILSLYDAENLGKEHFRKPVPPSPEDLSVICFTSGTTGDPKGAMITHQNIVSNAAAFLKCVEHAYEPTPDDVAISYLPLAHMFERIVQAVVYSCGARVGFFQGDIRLLADDMKTLKPTLFPAVPRLLNRIYDKVQNEAKTPLKKFLLKLAVSSKFKELQKGIIRHDSFWDKLIFAKIQDSLGGRVRVIVTGAAPMSTSVMTFFRAAMGCQVYEAYGQTECTGGCTFTLPGDWTSGHVGVPLACNYVKLEDVADMNYFTVNNEGEVCIKGTNVFKGYLKDPEKTQEALDSDGWLHTGDIGRWLPNGTLKIIDRKKNIFKLAQGEYIAPEKIENIYNRSQPVLQIFVHGESLRSSLVGVVVPDTDVLPSFAAKLGVKGSFEELCQNQVVREAILEDLQKIGKESGLKTFEQVKAIFLHPEPFSIENGLLTPTLKAKRGELSKYFRTQIDSLYEHIQD

SEQ ID NO: 78 - protein, 386 aa, Homo Sapiens
MEKLPHPQPHPFLPEANLSPAPAPDPSHSGPRKPSAQRTTLHSPHSTHNQPLRARRARGQVPKSSALAPSSSSVPQWAVFVLEPRWTVARNMELIQDTSRPPLEYVKGVPLIKYFAEALGPLQSFQARPDDLLISTYPKSGTTWVSQILDMIYQGGDLEKCHRAPIFMRVPFLEFKAPGIPSGMETLKDTPAPRLLKTHLPLALLPQTLLDQKVKVVYVARNAKDVAVSYYHFYHMAKVHPEPGTWDSFLEKFMVGEVSYGSWYQHVQEWWELSRTHPVLYLFYEDMKENPKREIQKILEFVGRSLPEETVDFMVQHTSFKEMKKNPMTNYTTVPQEFMDHSISPFMRKGMAGDWKTTFTVAQNERFDADYAEKMAGCSLSFRSEL

SEQ ID NO: 79 - protein, 421 aa, Homo Sapiens
MAAGFGRCCRVLRSISRFHWRSQHTKANRQREPGLGFSFEFTEQQKEFQATARKFAREEIIPVAAEYDKTGEYPVPLIRRAWELGLMNTHIPENCGGLGLGTFDACLISEELAYGCTGVQTAIEGNSLGQMPIIIAGNDQQKKKYLGRMTEEPLMCAYCVTEPGAGSDVAGIKTKAEKKGDEYIINGQKMWITNGGKANWYFLLARSDPDPKAPANKAFTGFIVEADTPGIQIGRKELNMGQRCSDTRGIVFEDVKVPKENVLIGDGAGFKVAMGAFDKTRPVVAAGAVGLAQRALDEATKYALERKTFGKLLVEHQAISFMLAEMAMKVELARMSYQRAAWEVDSGRRNTYYASIAKAFAGDIANQLATDAVQILGGNGFNTEYPVEKLMRDAKIYQIYEGTSQIQRLIVAREHIDKYKN

SEQ ID NO: 80 - protein, 515 aa, Homo Sapiens [sequence omitted]

SEQ ID NO: 81 - protein, 575 aa, Homo Sapiens
MTSKKLVNSVAGCADDALAGLVACNPNLQLLQGHRVALRSDLDSLKGRVALLSGGGSGHEPAHAGFIGKGMLTGVIAGAVFTSPAVGSILAAIRAVAQAGTVGTLLIVKNYTGDRLNFGLAREQARAEGIPVEMVVIGDDSAFTVLKKAGRRGLCGTVLIHKVAGALAEAGVGLEEIAKQVNVVAKAMGTLGVSLSSCSVPGSKPTFELSADEVELGLGIHGEAGVRRIKMATADEIVKLMLDHMTNTTNASHVPVQPGSSVVMMVNNLGGLSFLELGIIADATVRSLEGRGVKIARALVGTFMSALEMPGISLTLLLVDEPLLKLIDAETTAAAWPNVAAVSITGRKRSRVAPAEPQEAPDSTAAGGSASKRMALVLERVCSTLLGLEEHLNALDRAAGDGDCGTTHSRAARAIQEWLKEGPPPASPAQLLSKLSVLLLEKMGGSSGALYGLFLTAAAQPLKAKTSLPAWSAAMDAGLEAMQKYGKAAPGDRTMLDSLWAAGQELQAWKSPGADLLQVLTKAVKSAEAAAEATKNMEAGAGRASYISSARLEQPDPGAVAAAAILRAILEVLQS

SEQ ID NO: 82 - protein, 244 aa, Homo Sapiens
MAAAAAAGEARRVLVYGGRGALGSRCVQAFRARNWWVASVDVVENEEASASIIVKMTDSFTEQADQVTAEVGKLLGEEKVDAILCVAGGWAGGNAKSKSLFKNCDLMWKQSIWTSTISSHLATKHLKEGGLLTLAGAKAALDGTPGMIGYGMAKGAVHQLCQSLAGKNSGMPPGAAAIAVLPVTLDTPMNRKSMPEADFSSWTPLEFLVETFHDWITGKNRPSSGSLIQVVTTEGRTELTPAYF

SEQ ID NO: 83 - protein, 562 aa, Homo Sapiens
MVKIVTVKTQAYQDQKPGTSGLRKRVKVFQSSANYAENFIQSIISTVEPAQRQEATLVVGGDGRFYMKEAIQLIARIAAANGIGRLVIGQNGILSTPAVSCIIRKIKAIGGIILTASHNPGGPNGDFGIKFNISNGGPAPEAITDKIFQISKTIEEYAVCPDLKVDLGVLGKQQFDLENKFKPFTVEIVDSVEAYATMLRSIFDFSALKELLSGPNRLKIRIDAMHGVVGPYVKKILCEELGAPANSAVNCVPLEDFGGHHPDPNLTYAADLVETMKSGEHDFGAAFDGDGDRNMILGKHGFFVNPSDSVAVIAANIFSIPYFQQTGVRGFARSMPTSGALDRVASATKIALYETPTGWKFFGNLMDASKLSLCGEESFGTGSDHIREKDGLWAVLAWLSILATRKQSVEDILKDHWQKYGRNFFTRYDYEEVEAEGANKMMKDLEALMFDRSFVGKQFSANDKVYTVEKADNFEYSDPVDGSISRNQGLRLIFTDGSRIVFRLSGTGSAGATIRLYIDSYEKDVAKINQDPQVMLAPLISIALKVSQLQERTGRTAPTVIT

SEQ ID NO: 84 - protein, 562 aa, Homo Sapiens; identical to SEQ ID NO: 83

SEQ ID NO: 85 - protein, 679 aa, Homo Sapiens
MISASRAAAARLVGAAASRGPTAARHQDSWNGLSHEAFRLVSRRDYASEAIKGAVVGIDLGTTNSCVAVMEGKQAKVLENAEGARTTPSVVAFTADGERLVGMPAKRQAVTNPNNTFYATKRLIGRRYDDPEVQKDIKNVPFKIVRASNGDAWVEAHGKLYSPSQIGAFVLMKMKETAENYLGHTAKNAVITVPAYFNDSQRQATKDAGQISGLNVLRVINEPTAAALAYGLDKSEDKVIAVYDLGGGTFDISILEIQKGVFEVKSTNGDTFLGGEDFDQALLRHIVKEFKRETGVDLTKDNMALQRVREAAEKAKCELSSSVQTDINLPYLTMDSSGPKHLNMKLTRAQFEGIVTDLIRRTIAPCQKAMQDAEVSKSDIGEVILVGGMTRMPKVQQTVQDLFGRAPSKAVNPDEAVAIGAAIQGGVLAGDVTDVLLLDVTPLSLGIETLGGVFTKLINRNTTIPTKKSQVFSTAADGQTQVEIKVCQGEREMAGDNKLLGQFTLIGIPPAPRGVPQIEVTFDIDANGIVHVSAKDKGTGREQQIVIQSSGGLSKDDIENMVKNAEKYAEEDRRKKERVEAVNMAEGIIHDTETKMEEFKDQLPADECNKLKEEISKMRELLARKDSETGENIRQAASSLQQASLKLFEMAYKKMASEREGSGSSGTGEQKEDQKEEKQ

SEQ ID NO: 86 - protein, 498 aa, Homo Sapiens
MWGCQAPLSRLPASGETPMSQSWLVSPLATRPSFTARCSHSTRHTGWRWCCFMERPLTLTRGSSWAHCSYCHRGATGPWPLTFQLTTRSAMTSKGPEEEHPSVTLFRQYLRIRTVQPKPDYGAAVAFFEETARQLGLGCQKVEVAPGYVVTVLTWPGTNPTLSSILLNSHTDVVPVFKEHWSHDPFEAFKDSEGYIYARGAQDMKCVSIQYLEAVRRLKVEGHRFPRTIHMTFVPDEEVGGHQGMELFVQRPEFHALRAGFALDEGIANPTDAFTVFYSERSPWWVRVTSTGRPGHASRFMEDTAAEKLHKVVNSILAFREKEWQRLQSNPHLKEGSVTSVNLTKLEGGVAYNVIPATMSASFDFRVAPDVDFKAFEEQLQSWCQAAGEGVTLEFAQKWMHPQVTPTDDSNPWWAAFSRVCKDMNLTLEPEIMPAATDNRYIRAVGVPALGFSPMNRTPVLLHDHDERLHEAVFLRGVDIYTRLLPALASVPALPSDS

SEQ ID NO: 87 - protein, 244 aa, Homo Sapiens
MDKSELVQKAKLAEQAERYDDMAAAMKAVTEQGHELSNEERNLLSVAYKNVVGARRSSWRVISSIEQKTERNEKKQQMGKEYREKIEAELQDICNDVLELLDKYLIPNATQPESKVFYLKMKGDYFRYLSEVASGDNKQTTVSNSQQAYQEAFEISKKEMQPTHPIRLGLALNFSVFYYEILNSPEKACSLAKTAFDEAIAELDTLNEESYKDSTLIMQLLRDNLTLWTSENQGDEGDAGEGEN

SEQ ID NO: 88 - protein, 247 aa, Homo Sapiens
MVDREQLVQKARLAEQAERYDDMAAAMKNVTELNEPLSNEERNLLSVAYKNVVGARRSSWRVISSIEQKTSADGNEKKIEMVRAYREKIEKELEAVCQDVLSLLDNYLIKNCSETQYESKVFYLKMKGDYYRYLAEVATGEKRATVVESSEKAYSEAHEISKEHMQPTHPIRLGLALNYSVFYYEIQNAPEQACHLAKTAFDDAIAELDTLNEDSYKDSTLIMQLLRDNLTLWTSDQQDDDGGEGNN

SEQ ID NO: 89 - protein, 246 aa, Homo Sapiens
MGDREQLLQRARLAEQAERYDDMASAMKAVTELNEPLSNEDRNLLSVAYKNVVGARRSSWRVISSIEQKTMADGNEKKLEKVKAYREKIEKELETVCNDVLSLLDKFLIKNCNDFQYESKVFYLKMKGDYYRYLAEVASGEKKNSVVEASEAAYKEAFEISKEQMQPTHPIRLGLALNFSVFYYEIQNAPEQACLLAKQAFDDAIAELDTLNEDSYKDSTLIMQLLRDNLTLWTSDQQDEEAGEGN

SEQ ID NO: 90 - protein, 248 aa, Homo Sapiens [sequence omitted]

SEQ ID NO: 91 - protein, 1178 aa, Homo Sapiens
MLKFRTVHGGLRLLGIRRTSTAPAASPNVRRLEYKPIKKVMVANRGEIAIRVFRACTELGIRTVAIYSEQDTGQMHRQKADEAYLIGRGLAPVQAYLHIPDIIKVAKENNVDAVHPGYGFLSERADFAQACQDAGVRFIGPSPEVVRKMGDKVEARAIAIAAGVPVVPGTDAPITSLHEAHEFSNTYGFPIIFKAAYGGGGRGMRVVHSYEELEENYTRAYSEALAAFGNGALFVEKFIEKPRHIEVQILGDQYGNILHLYERDCSIQRRHQKVVEIAPAAHLDPQLRTRLTSDSVKLAKQVGYENAGTVEFLVDRHGKHYFIEVNSRLQVEHTVTEEITDVDLVHAQIHVAEGRSLPDLGLRQENIRINGCAIQCRVTTEDPARSFQPDTGRIEVFRSGEGMGIRLDNASAFQGAVISPHYDSLLVKVIAHGKDHPTAATKMSRALAEFRVRGVKTNIAFLQNVLNNQQFLAGTVDTQFIDENPELFQLRPAQNRAQKLLHYLGHVMVNGPTTPIPVKASPSPTDPVVPAVPIGPPPAGFRDILLREGPEGFARAVRNHPGLLLMDTTFRDAHQSLLATRVRTHDLKKIAPYVAHNFSKLFSMENWGGATFDVAMRFLYECPWRRLQELRELIPNIPFQMLLRGANAVGYTNYPDNVVFKFCEVAKENGMDVFRVFDSLNYLPNMLLGMEAAGSAGGVVEAAISYTGDVADPSRTKYSLQYYMGLAEELVRAGTHILCIKDMAGLLKPTACTMLVSSLRDRFPDLPLHIHTHDTSGAGVAAMLACAQAGADVVDVAADSMSGMTSQPSMGALVACTRGTPLDTEVPMERVFDYSEYWEGARGLYAAFDCTATMKSGNSDVYENEIPGGQYTNLHFQAHSMGLGSKFKEVKKAYVEANQMLGDLIKVTPSSKIVGDLAQFMVQNGLSRAEAEAQAEELSFPRSVVEFLQGYIGVPHGGFPEPFRSKVLKDLPRVEGRPGASLPPLDLQALEKELVDRHGEEVTPEDVLSAAMYPDVFAHFKDFTATFGPLDSLNTRLFLQGPKIAEEFEVELERGKTLHIKALAVSDLNRAGQRQVFFELNGQLRSILVKDTQAMKEMHFHPKALKDVKGQIGAPMPGKVIDIKVVAGAKVAKGQPLCVLSAMKMETVVTSPMEGTVRKVHVTKDMTLEGDDLILEIE

SEQ ID NO: 92 - protein, 338 aa, Homo Sapiens
MLSALARPASAALRRSFSTSAQNNAKVAVLGASGGIGQPLSLLLKNSPLVSRLTLYDIAHTPGVAADLSHIETKAAVKGYLGPEQLPDCLKGCDVVVIPAGVPRKPGMTRDDLFNTNATIVATLTAACAQHCPEAMICVIANPVNSTIPITAEVFKKHGVYNPNKIFGVTTLDIVRANTFVAELKGLDPARVNVPVIGGHAGKTIIPLISQCTPKVDFPQDQLTALTGRIQEAGTEVVKAKAGAGSATLSMAYAGARFVFSLVDAMNGKEGVVECSFVKSQETECTYFSTPLLLGKKGIEKNLGIGKVSSFEEKMISDAIPELKASIKKGEDFVKTLK

SEQ ID NO: 93 - protein, 370 aa, Homo Sapiens
MLPRLICINDYEQHAKSVLPKSIYDYYRSGANDEETLADNIAAFSRWKLYPRMLRNVAETDLSTSVLGQRVSMPICVGATAMQRMAHVDGELATVRACQSLGTGMMLSSWATSSIEEVAEAGPEALRWLQLYIYKDREVTKKLVRQAEKMGYKAIFVTVDTPYLGNRLDDVRNRFKLPPQLRMKNFETSTLSFSPEENFGDDSGLAAYVAKAIDPSISWEDIKWLRRLTSLPIVAKGILRGDDAREAVKHGLNGILVSNHGARQLDGVPATIDVLPEIVEAVEGKVEVFLDGGVRKGTDVLKALALGAKAVFVGRPIVWGLAFQGEKGVQDVLEILKEEFRLAMALSGCQNVKVIDKTLVRKNPLAVSKI

SEQ ID NO: 94 - protein, 667 aa, Homo Sapiens
MAKPAQGAKYRGSIHDFPGFDPNQDAEALYTAMKGFGSDKEAILDIITSRSNRQRQEVCQSYKSLYGKDLIADLKYELTGKFERLIVGLMRPPAYCDAKEIKDAISGIGTDEKCLIEILASRTNEQMHQLVAAYKDAYERDLEADIIGDTSGHFQKMLVVLLQGTREEDDVVSEDLVQQDVQDLYEAGELKWGTDEAQFIYILGNRSKQHLRLVFDEYLKTTGKPIEASIRGELSGDFEKLMLAVVKCIRSTPEYFAERLFKAMKGLGTRDNTLIRIMVSRSELDMLDIREIFRTKYEKSLYSMIKNDTSGEYKKTLLKLSGGDDDAAGQFFPEAAQVAYQMWELSAVARVELKGTVRPANDFNPDADAKALRKAMKGLGTDEDTIIDIITHRSNVQRQQIRQTFKSHFGRDLMTDLKSEISGDLARLILGLMMPPAHYDAKQLKKAMEGAGTDEKALIEILATRTNAEIRAINEAYKEDYHKSLEDALSSDTSGHFRRILISLATGHREEGGENLDQAREDAQEIADTPSGDKTSLETRFMTILCTRSYPHLRRVFQEFIKMTNYDVEHTIKKEMSGDVRDAFVAIVQSVKNKPLFFADKLYKSMKGAGTDEKTLTRIMVSRSEIDLLNIRREFIEKYDKSLHQAIEGDTSGDFLKALLALCGGED

SEQ ID NO: 95 - protein, 169 aa, Homo Sapiens
MLATRVFSLVGKRAISTSVCVRAHESVVKSEDFSLPAYMDRRDHPLPEVAHVKHLSASQKALKEKEKASWSSLSMDEKVELYRIKFKESFAEMNRGSNEWKTVVGGAMFFIGFTALVIMWQKHYVYGPLPQSFDKEWVAKQTKRMLDMKVNPIQGLASKWDYEKNEWKK

SEQ ID NO: 96 - protein, 698 aa, Homo Sapiens
MRLAVGALLVCAVLGLCLAVPDKTVRWCAVSEHEATKCQSFRDHMKSVIPSDGPSVACVKKASYLDCIRAIAANEADAVTLDAGLVYDAYLAPNNLKPVVAEFYGSKEDPQTFYYAVAVVKKDSGFQMNQLRGKKSCHTGLGRSAGWNIPIGLLYCDLPEPRKPLEKAVANFFSGSCAPCADGTDFPQLCQLCPGCGCSTLNQYFGYSGAFKCLKDGAGDVAFVKHSTIFENLANKADRDQYELLCLDNTRKPVDEYKDCHLAQVPSHTVVARSMGGKEDLIWELLNQAQEHFGKDKSKEFQLFSSPHGKDLLFKDSAHGFLKVPPRMDAKMYLGYEYVTAIRNLREGTCPEAPTDECKPVKWCALSHHERLKCDEWSVNSVGKIECVSAETTEDCIAKIMNGEADAMSLDGGFVYIAGKCGLVPVLAENYNKSDNCEDTPEAGYFAIAVVKKSASDLTWDNLKGKKSCHTAVGRTAGWNIPMGLLYNKINHCRFDEFFSEGCAPGSKKDSSLCKLCMGSGLNLCEPNNKEGYYGYTGAFRCLVEKGDVAFVKHQTVPQNTGGKNPDPWAKNLNEKDYELLCLDGTRKPVEEYANCHLARAPNHAVVTRKDKEACVHKILRQQQHLFGSNVTDCSGNFCLFRSETKDLLFRDDTVCLAKLHDRNTYEKYLGEEYVKAVGNLRKCSTSSLLEACTFRRP

SEQ ID NO: 97 - protein, 627 aa, Homo Sapiens
MADRRTPTPFAGCRLPRQRRARDASQVSAPGTRRIMEGKWLLCMLLVLGTAIVEAHDGHDDDVIDIEDDLDDVIEEVEDSKPDTTAPPSSPKVTYKAPVPTGEVYFADSFDRGTLSGWILSKAKKDDTDDEIAKYDGKWEVEEMKESKLPGDKGLVLMSRAKHHAISAKLNKPFLFDTKPLIVQYEVNFQNGIECGGAYVKLLSKTPELNLDQFHDKTPYTIMFGPDKCGEDYKLHFIFRHKNPKTGIYEEKHAKRPDADLKTYFTDKKTHLYTLILNPDNSFEILVDQSVVNSGNLLNDMTPPVNPSREIEDPEDRKPEDWDERPKIPDPEAVKPDDWDEDAPAKIPDEEATKPEGWLDDEPEYVPDPDAEKPEDWDEDMDGEWEAPQIANPRCESAPGCGVWQRPVIDNPNYKGKWKPPMIDNPSYQGIWKPRKIPNPDFFEDLEPFRMTPFSAIGLELWSMTSDIFFDNFIICADRRIVDDWANDGWGLKKAADGAAEPGVVGQMIEAAEERPWLWVVYILTVALPVFLVILFCCSGKKQTSGMEYKKTDAPQPDVKEEEEEKEEEKDKGDEEEEGEEKLEEKQKSDAEEDGGTVSQEEEDRKPKAEEDEILNRSPRNRKPRRE

SEQ ID NO: 98 - protein, 1338 aa, Homo Sapiens
MDRASELLFYVNGRKVIEKNVDPETMLLPYLRKKLRLTGTKYGCGGGGCGACTVMISRYNPITKRIRHHPANACLIPICSLYGAAVTTVEGIGSTHTRIHPVQERIAKCHGTQCGFCTPGMVMSIYTLLRNHPEPTLDQLTDALGGNLCRCTGYRPIIDACKTFCKTSGCCQSKENGVCCLDQGINGLPEFEEGSKTSPKLFAEEEFLPLDPTQELIFPPELMIMAEKQSQRTRVFGSERMMWFSPVTLKELLEFKFKYPQAPVIMGNTSVGPEVKFKGVFHPVIISPDRIEELSVVNHAYNGLTLGAGLSLAQVKDILADVVQKLPEEKTQMYHALLKHLGTLAGSQIRNMASLGGHIISRHPDSDLNPILAVGNCTLNLLSKEGKRQIPLNEQFLSKCPNADLKPQEILVSVNIPYSRKWEFVSAFRQAQRQENALAIVNSGMRVFFGEGDGIIRELCISYGGVGPATICAKNSCQKLIGRHWNEQMLDIACRLILNEVSLLGSAPGGKVEFKRTLIISFLFKFYLEVSQILKKMDPVHYPSLADKYESALEDLHSKHHCSTLKYQNIGPKQHPEDPIGHPIMHLSGVKHATGEAIYCDDMPLVDQELFLTFVTSSRAHAKIVSIDLSEALSMPGVVDIMTAEHLSDVNSFCFFTEAEKFLATDKVFCVGQLVCAVLADSEVQAKRAAKRVKIVYQDLEPLILTIEESIQHNSSFKPERKLEYGNVDEAFKVVDQILEGEIHMGGQEHFYMETQSMLVVPKGEDQEMDVYVSTQFPKYIQDIVASTLKLPANKVMCHVRRVGGAFGGKVLKTGIIAAVTAFAANKHGRAVRCVLERGEDMLITGGRHPYLGKYKAGFMNDGRILALDMEHYSNAGASLDESLFVIEMGLLKMDNAYKFPNLRCRGWACRTNLPSNTAFRGFGFPQAALITESCITEVAAKCGLSPEKVRIINMYKEIDQTPYKQEINAKNLIQCWRECMAMSSYSLRKVAVEKFNAENYWKKKGLAMVPLKFPVGLGSRAAGQAAALVHIYLDGSVLVTHGGIEMGQGVHTKMIQVVSRELRMPMSNVHLRGTSTETVPNANISGGSVVADLNGLAVKDACQTLLKRLEPIISKNPKGTWKDWAQTAFDESINLSAVGYFRGYESDMNWEKGEGQPFEYFVYGAACSEVEIDCLTGDHKNIRTDIVMDVGCSINPAIDIGQIEGAFIQGMGLYTIEELNYSPQGILHTRGPDQYKIPAICDMPTELHIALLPPSQNSNTLYSSKGLGESGVFLGCSVFFAIHDAVSAARQERGLHGPLTLNSPLTPEKIRMACEDKFTKMIPRDEPGSYVPWNVPI

SEQ ID NO: 99 - protein, 1333 aa, Homo Sapiens
MTADKLVFFVNGRKVVEKNADPETTLLAYLRRKLGLSGTKLGCGEGGCGACTVMLSKYDRLQNKIVHFSANACLAPICSLHHVAVTTVEGIGSTKTRLHPVQERIAKSHGSQCGFCTPGIVMSMYTLLRNQPEPTMEEIENAFQGNLCRCTGYRPILQGFRTFARDGGCCGGDGNNPNCCMNQKKDHSVSLSPSLFKPEEFTPLDPTQEPIFPPELLRLKDTPRKQLRFEGERVTWIQASTLKELLDLKAQHPDAKLVVGNTEIGIEMKFKNMLFPMIVCPAWIPELNSVEHGPDGISFGAACPLSIVEKTLVDAVAKLPAQKTEVFRGVLEQLRWFAGKQVKSVASVGGNIITASPISDLNPVFMASGAKLTLVSRGTRRTVQMDHTFFPGYRKTLLSPEEILLSIEIPYSREGEYFSAFKQASRREDDIAKVTSGMRVLFKPGTTEVQELALCYGGMANRTISALKTTQRQLSKLWKEELLQDVCAGLAEELHLPPDAPGGMVDFRCTLTLSFFFKFYLTVLQKLGQENLEDKCGKLDPTFASATLLFQKDPPADVQLFQEVPKGQSEEDMVGRPLPHLAADMQASGEAVYCDDIPRYENELSLRLVTSTRAHAKIKSIDTSEAKKVPGFVCFISADDVPGSNITGICNDETVFAKDKVTCVGHIIGAVVADTPEHTQRAAQGVKITYEELPAIITIEDAIKNNSFYGPELKIEKGDLKKGFSEADNVVSGEIYIGGQEHFYLETHCTIAVPKGEAGEMELFVSTQNTMKTQSFVAKMLGVPANRIVVRVKRMGGGFGGKETRSTVVSTAVALAAYKTGRPVRCMLDRDEDMLITGGRHPFLARYKVGFMKTGTVVALEVDHFSNVGNTQDLSQSIMERALFHMDNCYKIPNIRGTGRLCKTNLPSNTAFRGFGGPQGMLIAECWMSEVAVTCGMPAEEVRRKNLYKEGDLTHFNQKLEGFTLPRCWEECLASSQYHARKSEVDKFNKENCWKKRGLCIIPTKFGISFTVPFLNQAGALLHVYTDGSVLLTHGGTEMGQGLHTKMVQVASRALKIPTSKIYISETSTNTVPNTSPTAASVSADLNGQAVYAACQTILKRLEPYKKKNPSGSWEDWVTAAYMDTVSLSATGFYRTPNLGYSFETNSGNPFHYFSYGVACSEVEIDCLTGDHKNLRTDIVMDVGSSLNPAIDIGQVEGAFVQGLGLFTLEELHYSPEGSLHTRGPSTYKIPAFGSIPIEFRVSLLRDCPNKKAIYASKAVGEPPLFLAASIFFAIKDAIRAARAQHTGNNVKELFRLDSPATPEKIRNACVDKFTTLCVTGVPENCKPWSVRV

SEQ ID NO: 100 - protein, 664 aa, Homo Sapiens
METPSQRRATRSGAQASSTPLSPTRITRLQEKEDLQELNDRLAVYIDRVRSLETENAGLRLRITESEEVVSREVSGIKAAYEAELGDARKTLDSVAKERARLQLELSKVREEFKELKARNTKKEGDLIAAQARLKDLEALLNSKEAALSTALSEKRTLEGELHDLRGQVAKLEAALGEAKKQLQDEMLRRVDAENRLQTMKEELDFQKNIYSEELRETKRRHETRLVEIDNGKQREFESRLADALQELRAQHEDQVEQYKKELEKTYSAKLDNARQSAERNSNLVGAAHEELQQSRIRIDSLSAQLSQLQKQLAAKEAKLRDLEDSLARERDTSRRLLAEKEREMAEMRARMQQQLDEYQELLDIKLALDMEIHAYRKLLEGEEERLRLSPSPTSQRSRGRASSHSSQTQGGGSVTKKRKLESTESRSSFSQHARTSGRVAVEEVDEEGKFVRLRNKSNEDQSMGNWQIKRQNGDDPLLTYRFPPKFTLKAGQVVTIWAAGAGATHSPPTDLVWKAQNTWGCGNSLRTALINSTGEEVAMRKLVRSVTVVEDDEDEDGDDLLHHHHGSHCSSSGDPAEYNLRSRTVLCGTCGQPADKASASGSGAQVGGPISSGSSASSVTVTRSYRSVGGSGGGSFGDNLVTRSYLLGNSSPRTQSPQNCSIM

SEQ ID NO: 101 - protein, 835 aa, Homo Sapiens
MASLGANPRRTPQGPRPGAASSGFPSPAPVPGPREAEEEEVEEEEELAEIHLCVLWNSGYLGIAYYDTSDSTIHFMPDAPDHESLKLLQRVLDEINPQSVVTSAKQDENMTRFLGKLASQEHREPKRPEIIFLPSVDFGLEISKQRLLSGNYSFIPDAMTATEKILFLSSIIPFDCLLTVRALGGLLKFLGRRRIGVELEDYNVSVPILGFKKFMLTHLVNIDQDTYSVLQIFKSESHPSVYKVASGLKEGLSLFGILNRCHCKWGEKLLRLWFTRPTHDLGELSSRLDVIQFFLLPQNLDMAQMLHRLLGHIKNVPLILKRMKLSHTKVSDWQVLYKTVYSALGLRDACRSLPQSIQLFRDIAQEFSDDLHHIASLIGKVVDFEGSLAENRFTVLPNIDPEIDEKKRRLMGLPSFLTEVARKELENLDSRIPSCSVIYIPLIGFLLSIPRLPSMVEASDFEINGLDFMFLSEEKLHYRSARTKELDALLGDLHCEIRDQETLLMYQLQCQVLARAAVLTRVLDLASRLDVLLALASAARDYGYSRPRYSPQVLGVRIQNGRHPLMELCARTFVPNSTECGGDKGRVKVITGPNSSGKSIYLKQVGLITFMALVGSFVPAEEAEIGAVDAIFTRIHSCESISLGLSTFMIDLNQQVAKAVNNATAQSLVLIDEFGKGTNTVDGLALLAAVLRHWLARGPTCPHIFVATNFLSLVQLQLLPQGPLVQYLTMETCEDGNDLVFFYQVCEGVAKASHASHTAAQAGLPDKLVARGKEVSDLIRSGKPIKPVKDLLKKNQMENCQTLVDKFMKLDLEDPNLDLNVFMSQEVLPAATSIL

SEQ ID NO: 102 - protein, 991 aa, Homo Sapiens
MRHRVCRGRSGQGRRRSSVIPWPVPKHVGWVVLLGCGGSGTSILVVSIVGSGLIKAMAPAEILNGKEISAQIRARLKNQVTQLKEQVPGFTPRLAILQVGNRDDSNLYINVKLKAAEEIGIKATHIKLPRTTTESEVMKYITSLNEDSTVHGFLVQLPLDSENSINTEEVINAIAPEKDVDGLTSINAGKLARGDLNDCFIPCTPKGCLELIKETGVPIAGRHAVVVGRSKIVGAPMHDLLLWNNATVTTCHSKTAHLDEEVNKGDILVVATGQPEMVKGEWIKPGAIVIDCGINYVPDDKKPNGRKVVGDVAYDEAKERASFITPVPGGVGPMTVAMLMQSTVESAKRFLEKFKPGKWMIQYNNLNLKTPVPSDIDISRSCKPKPIGKLAREIGLLSEEVELYGETKAKVLLSALERLKHRPDGKYVVVTGITPTPLGEGKSTTTIGLVQALGAHLYQNVFACVRQPSQGPTFGIKGGAAGGGYSQVIPMEEFNLHLTGDIHAITAANNLVAAAIDARIFHELTQTDKALFNRLVPSVNGVRRFSDIQIRRLKRLGIEKTDPTTLTDEEINRFARLDIDPETITWQRVLDTNDRFLRKITIGQAPTEKGHTRTAQFDISVASEIMAVLALTTSLEDMRERLGKMVVASSKKGEPVSAEDLGVSGALTVLMKDAIKPNLMQTLEGTPVFVHAGPFANIAHGNSSIIADRIALKLVGPEGFVVTEAGFGADIGMEKFFNIKCRYSGLCPHVVVLVATVRALKMHGGGPTVTAGLPLPKAYIQENLELVEKGFSNLKKQIENARMFGIPVVVAVNAFKTDTESELDLISRLSREHGAFDAVKCTHWAEGGKGALALAQAVQRAAQAPSSFQLLYDLKLPVEDKIRIIAQKIYGADDIELLPEAQHKAEVYTKQGFGNLPICMAKTHLSLSHNPEQKGVPTGFILPIRDIRASVGAGFLYPLVGTMSTMPGLPTRPCFYDIDLDPETEQVNGLF

SEQ ID NO: 103 - protein, 102 aa, Homo Sapiens
MSEKSVEAAAELSAKDLKEKKEKVEEKASRKERKKEVVEEEENGAEEEEEETAEDGEEEDEGEEEDEEEEEEDDEGPALKRAAEEEDEADPKRQKTENGASA

SEQ ID NO: 104 - protein, 622 aa, Homo Sapiens
MPPQLQNGLNLSAKVVQGSLDSLPQAVREFLENNAELCQPDHIHICDGSEEENGRLLGQMEEEGILRRLKKYDNCWLALTDPRDVARIESKTVIVTQEQRDTVPIPKTGLSQLGRWMSEEDFEKAFNARFPGCMKGRTMYVIPFSMGPLGSPLSKIGIELTDSPYVVASMRIMTRMGTPVLEAVGDGEFVKCLHSVGCPLPLQKPLVNNWPCNPELTLIAHLPDRREIISFGSGYGGNSLLGKKCFALRMASRLAKEEGWLAEHMLILGITNPEGEKKYLAAAFPSACGKTNLAMMNPSLPGWKVECVGDDIAWMKFDAQGHLRAINPENGFFGVAPGTSVKTNPNAIKTIQKNTIFTNVAETSDGGVYWEGIDEPLASGVTITSWKNKEWSSEDGEPCAHPNSRFCTPASQCPIIDAAWESPEGVPIEGIIFGGRRPAGVPLVYEALSWQHGVFVGAAMRSEATAAAEHKGKIIMHDPFAMRPFFGYNFGKYLAHWLSMAQHPAAKLPKIFHVNWFRKDKEGKFLWPGFGENSRVLEWMFNRIDGKASTKLTPIGYIPKEDALNLKGLGHINMMELFSISKEFWEKEVEDIEKYLEDQVNADLPCEIEREILALKQRISQM

SEQ ID NO: 105 - protein, 483 aa, Homo Sapiens
MTMPVNGAHKDADLWSSHDKMLAQPLKDSDVEVYNIIKKESNRQRVGLELIASENFASRAVLEALGSCLNNKYSEGYPGQRYYGGTEFIDELETLCQKRALQAYKLDPQCWGVNVQPYSGSPANFAVYTALVEPHGRIMGLDLPDGGHLTHGFMTDKKKISATSIFFESMPYKVNPDTGYINYDQLEENARLFHPKLIIAGTSCYSRNLEYARLRKIADENGAYLMADMAHISGLVAAGVVPSPFEHCHVVTTTTHKTLRGCRAGMIFYRKGVKSVDPKTGKEILYNLESLINSAVFPGLQGGPHNHAIAGVAVALKQAMTLEFKVYQHQVVANCRALSEALTELGYKIVTGGSDNHLILVDLRSKGTDGGRAEKVLEACSIACNKNTCPGDRSALRPSGLRLGTPALTSRGLLEKDFQKVAHFIHRGIELTLQIQSDTGVRATLKEFKERLAGDKYQAAVQALREEVESFASLFPLPGLPDF

SEQ ID NO: 106 - protein, 98 aa, Homo Sapiens
MMCGAPSATQPATAETQHIADQVRSQLEEKENKKFPVFKAVSFKSQVVAGTNYFIKVHVGDEDFVHLRVFQSLPHENKPLTLSNYQTNKAKHDELTYF

SEQ ID NO: 107 - protein, 488 aa, Homo Sapiens
MRIITAPASKVSRGSNELMILARRSDRGSPTSPAHSLSRKSPIMYPSTTMANAPGLVSCTFFLAVNGLYSSSDDVIELTPSNFNREVIQSDSLWLVEFYAPWCGHCQRLTPEWKKAATALKDVVKVGAVDADKHHSLGGQYGVQGFPTIKIFGSNKNRPEDYQGGRTGEAIVDAALSALRQLVKDRLGGRSGGYSSGKQGRSDSSSKKDVIELTDDSFDKNVLDSEDVWMVEFYAPWCGHCKNLEPEWAAAASEVKEQTKGKVKLAAVDATVNQVLASRYGIRGFPTIKIFQKGESPVDYDGGRTRSDIVSRALDLFSDNAPPPELLEIINEDIAKRTCEEHQLCVVAVLPHILDTGAAGRNSYLEVLLKLADKYKKKMWGWLWTEAGAQSELETALGIGGFGYPAMAAINARKMKFALLKGSFSEQGINEFLRELSFGRGSTAPVGGGAFPTIVEREPWDGRDGELPVEDDIDLSDVELDDLGKDEL

SEQ ID NO: 108 - protein, 858 aa, Homo Sapiens
MVNFTVDQIRAIMDKKANIRNMSVIAHVDHGKSTLTDSLVCKAGIIASARAGETRFTDTRKDEQERCITIKSTAISLFYELSENDLNFIKQSKDGAGFLINLIDSPGHVDFSSEVTAALRVTDGALVVVDCVSGVCVQTETVLRQAIAERIKPVLMMNKMDRALLELQLEPEELYQTFQRIVENVNVIISTYGEGESGPMGNIMIDPVLGTVGFGSGLHGWAFTLKQFAEMYVAKFAAKGEGQLGPAERAKKVEDMMKKLWGDRYFDPANGKFSKSATSPEGKKLPRTFCQLILDPIFKVFDAIMNFKKEETAKLIEKLDIKLDSEDKDKEGKPLLKAVMRRWLPAGDALLQMITIHLPSPVTAQKYRCELLYEGPPDDEAAMGIKSCDPKGPLMMYISKMVPTSDKGRFYAFGRVFSGLVSTGLKVRIMGPNYTPGKKEDLYLKPIQRTILMMGRYVEPIEDVPCGNIVGLVGVDQFLVKTGTITTFEHAHNMRVMKFSVSPVVRVAVEAKNPADLPKLVEGLKRLAKSDPMVQCIIEESGEHIIAGAGELHLEICLKDLEEDHACIPIKKSDPVVSYRETVSEESNVLCLSKSPNKHNRLYMKARPFPDGLAEDIDKGEVSARQELKQRARYLAEKYEWDVAEARKIWCFGPDGTGPNILTDITKGVQYLNEIKDSVVAGFQWATKEGALCEENMRGVRFDVHDVTLHADAIHRGGGQIIPTARRCLYASVLTAQPRLMEPIYLVEIQCPEQVVGGIYGVLNRKRGHVFEESQVAGTPMFVVKAYLPVNESFGFTADLRSNTGGQAFPQCVFDHWQILPGDPFDNSSRPSQVVAETRKRKGLKEGIPALDNFLDKL

SEQ ID NO: 109 - protein, 218 aa, Homo Sapiens
MPMILGYWDIRGLAHAIRLLLEYTDSSYEEKKYTMGDAPDYDRSQWLNEKFKLGLDFPNLPYLIDGAHKITQSNAILCYIARKHNLCGETEEEKIRVDILENQTMDNHMQLGMICYNPEFEKLKPKYLEELPEKLKLYSEFLGKRPWFAGNKITFVDFLVYDVLDLHRIFEPKCLDAFPNLKDFISRFEGLEKISAYMKSSRFLPRPVFSKMAVWGNK

SEQ ID NO: 110 - protein, 323 aa, Homo Sapiens
MDPKYQRVELNDGHFMPVLGFGTYAPPEVPRNRAVEVTKLAIEAGFRHIDSAYLYNNEEQVGLAIRSKIADGSVKREDIFYTSKLWCTFFQPQMVQPALESSLKKLQLDYVDLYLLHFPMALKPGETPLPKDENGKVIFDTVDLSATWEVMEKCKDAGLAKSIGVSNFNCRQLEMILNKPGLKYKPVCNQVECHPYLNQSKLLDFCKSKDIVLVAHSALGTQRHKLWVDPNSPVLLEDPVLCALAKKHKQTPALIALRYQLQRGVVVLAKSYNEQRIRENIQVFEFQLTSEDMKVLDGLNRNYRYVVMDFLMDHPDYPFSDEY

SEQ ID NO: 111 - protein, 412 aa, Homo Sapiens
MQPSSLLPLALCLLAAPASALVRIPLHKFTSIRRTMSEVGGSVEDLIAKGPVSKYSQAVPAVTEGPIPEVLKNYMDAQYYGEIGIGTPPQCFTVVFDTGSSNLWVPSIHCKLLDIACWIHHKYNSDKSSTYVKNGTSFDIHYGSGSLSGYLSQDTVSVPCQSASSASALGGVKVERQVFGEATKQPGITFIAAKFDGILGMAYPRISVNNVLPVFDNLMQQKLVDQNIFSFYLSRDPDAQPGGELMLGGTDSKYYKGSLSYLNVTRKAYWQVHLDQVEVASGLTLCKEGCEAIVDTGTSLMVGPVDEVRELQKAIGAVPLIQGEYMIPCEKVSTLPAITLKLGGKGYKLSPEDYTLKVSQAGKTLCLSGFMGMDIPPPSGPLWILGDVFIGRYYTVFDRDNNRVGFAEAARL

SEQ ID NO: 112 - protein, 395 aa, Homo Sapiens
MNGPVDGLCDHSLSEGVFMFTSESVGEGHPDKICDQISDAVLDAHLKQDPNAKVACETVCKTGMVLLCGEITSMAMVDYQRVVRDTIKHIGYDDSAKGFDFKTCNVLVALEQQSPDIAQCVHLDRNEEDVGAGDQGLMFGYATDETEECMPLTIILAHKLNARMADLRRSGLLPWLRPDSKTQVTVQYMQDNGAVIPVRIHTIVISVQHNEDITLEEMRRALKEQVIRAVVPAKYLDEDTVYHLQPSGRFVIGGPQGDAGVTGRKIIVDTYGGWGAHGGGAFSGKDYTKVDRSAAYAARWVAKSLVKAGLCRRVLVQVSYAIGVAEPLSISIFTYGTSQKTERELLDVVHKNFDLRPGVIVRDLDLKKPIYQKTACYGHFGRSEFPWEVPRKLVF

SEQ ID NO: 113 - protein, 486 aa, Homo Sapiens
AERWVAPAVLRRARFASTFFLSPQIYAHKDGDLRSAFFILSFKRGEFIPFLNWTLYTYPENWRAFKALIAAQYSGAQVRVLSAPPHFHFGQTNRTPEFLRKFPAGKVPAFEGDDGFCVFESNAIAYYVSNEELRGSTPEAAAQVVQWVSFADSDIVPPASTWVFPTLGIMHHNKQATENAKEEVRRILGLLDAYLKTRTFLVGERVTLADITVVCTLLWLYKQVLEPSFRQAFPNTNRWFLTCINQPQFRAVLGEVKLCEKMAQFDAKKFAETQPKKDTPRKEKGSREEKQKPQAERKEEKKAAAPAPEEEMDECEQALAAEPKAKDPFAHLPKSTFVLDEFKRKYSNEDTLSVALPYFWEHFDKDGWSLWYSEYRFPEELTQTFMSCNLITGMFQRLDKLRKNAFASVILFGTNNSSSISGVWVFRGQELAFPLSPDWQVDYESYTWRKLDPGSEETQTLVREYFSWEGAFQHVGKAFNQGKIFK

SEQ ID NO: 114 - protein, 519 aa, Homo Sapiens
MAAPSRLLIRGGRVVNDDFSEVADVLVEDGVVRALGHDLLPPGGAPAGLRVLDAAGKLVLPGGIDTHTHMQFPFMGSRSIDDFHQGTKAALSGGTTMIIDFAIPQKGGSLIEAFETWRSWADPKVCCDYSLHVAVTWWSDQVKEEMKILVQDKGVNSFKMFMAYKDLYMVTDLELYEAFSRCKEIGAIAQVHAENGDLIAEGAKKMLALGITGPEGHELCRPEAVEAEATLRAITIASAVNCPLYIVHVMSKSAAKVIADARRDGKVVYGEPIAASLGTDGTHYWNKEWHHAAHHVMGPPLRPDPSTPDFLMNLLANDDLTTTGTDNCTFNTCQKALGKDDFTKIPNGVNGVEDRMSVIWEKGVHSGKMDENRFVAVTSTNAAKIFNLYPRKGRIAVGSDADIVIWDPKGTRTISAKTHHQAVNFNIFEGMVCHGVPLVTISRGKVVYEAGVFSVTAGDGKFIPRKPFAEYIYKRIKQRDRTCTPTPVERAPYKGEVATLKSRVTKEDATAGTRKQAHP

SEQ ID NO: 115 - protein, 239 aa, Homo Sapiens
MAPSVPAAEPEYPKGIRAVLLGPPGAGKGTQAPRLAENFCVCHLATGDMLRAMVASGSELGKKLKATMDAGKLVSDEMVVELIEKNLETPLCKNGFLLDGFPRTVRQAEMLDDLMEKRKEKLDSVIEFSIPDSLLIRRITGRLIHPKSGRSYHEEFNPPKEPMKDDITGEPLIRRSDDNEKALKIRLQAYHTQTTPLIEYYRKRGIHSAIDASQTPDVVFASILAAFSKATCKDLVMFI

SEQ ID NO: 116 - protein, 445 aa, Homo Sapiens
MREIVHIQAGQCGNQIGAKFWEVISDEHGIDPTGSYHGDSDLQLERINVYYNEAAGNKYVPRAILVDLEPGTMDSVRSGPFGQIFRPDNFVFGQSGAGNNWAKGHYTEGAELVDSVLDVVRKESESCDCLQGFQLTHSLGGGTGSGMGTLLISKIREEYPDRIMNTFSVMPSPKVSDTVVEPYNATLSVHQLVENTDETYSIDNEALYDICFRTLKLTTPTYGDLNHLVSATMSGVTTCLRFPGQLNADLRKLAVNMVPFPRLHFFMPGFAPLTSRGSQQYRALTVPELTQQMFDSKNMMAACDPRHGRYLTVAAIFRGRMSMKEVDEQMLNVQNKNSSYFVEWIPNNVKTAVCDIPPRGLKMSATFIGNSTAIQELFKRISEQFTAMFRRKAFLHWYTGEGMDEMEFTEAESNMNDLVSEYQQYQDATADEQGEFEEEEGEDEA

SEQ ID NO: 117 - protein, 335 aa, Homo Sapiens
MKLPARVFFTLGSRLPCGLAPRRFFSYGTKILYQNTEALQSKFFSPLQKAMLPPNSFQGKVAFITGGGTGLGKGMTTLLSSLGAQCVIASRKMDVLKATAEQISSQTGNKVHAIQCDVRDPDMVQNTVSELIKVAGHPNIVINNAAGNFISPTERLSPNAWKTITDIVLNGTAFVTLEIGKQLIKAQKGAAFLSITTIYAETGSGFVVPSASAKAGVEAMSKSLAAEWGKYGMRFNVIQPGPIKTKGAFSRLDPTGTFEKEMIGRIPCGRLGTVEELANLAAFLCSDYASWINGAVIKFDGGEEVLISGEFNDLRKVTKEQWDTIEELIRKTKGS

SEQ ID NO: 118 - protein, 314 aa, Homo Sapiens
MAFVTRQFMRSVSSSSTASASAKKIIVKHVTVIGGGLMGAGIAQVAAATGHTVVLVDQTEDILAKSKKGIEESLRKVAKKKFAENLKAGDEFVEKTLSTIATSTDAASVVHSTDLVVEAIVENLKVKNELFKRLDKFAAEHTIFASNTSSLQITSIANATTRQDRFAGLHFFNPVPVMKLVEVIKTPMTSQKTFESLVDFSKALGKHPVSCKDTPGFIVNRLLVPYLMEAIRLYERGDASKEDIDTAMKLGAGYPMGPFELLDYVGLDTTKFIVDGWHEMDAENPLHQPSPSLNKLVAENKFGKKTGEGFYKYK

SEQ ID NO: 119 - protein, 165 aa, Homo Sapiens [sequence omitted]

SEQ ID NO: 120 - protein, 518 aa, Homo Sapiens
MFLRAGLAALSPLLRSLRPSPVAAMSTGTFVVSQPLNYRGGARVEPADASGTEKAFEPATGRVIATFTCSGEKEVNLAVQNAKAAFKIWSQKSGMERCRILLEAARIIREREDEIATMECINNGKSIFEARLDIDISWQCLEYYAGLAASMAGEHIQLPGGSFGYTRREPLGVCVGIGAWNYPFQIASWKSAPALACGNAMVFKPSPFTPVSALLLAEIYSEAGVPPGLFNVVQGGAATGQFLCQHPDVAKVSFTGSVPTGMKIMEMSAKGIKPVTLELGGKSPLIIFSDCDMNNAVKGALMANFLTQGQVCCNGTRVFVQKEILDKFTEEVVKQTQRIKIGDPLLEDTRMGPLINRPHLERVLGFVKVAKEQGAKVLCGGDIYVPEDPKLKDGYYMRPCVLTNCRDDMTCVKEEIFGPVMSILSFDTEAEVLERANDTTFGLAAGVFTRDIQRAHRVVAELQAGTCFINNYNVSPVELPFGGYKKSGFGRENGRVTIEYYSQLKTVCVEMGDVESAF

SEQ ID NO: 121 - protein, 847 aa, Homo Sapiens
MAKPLTDQEKRRQISIRGIVGVENVAELKKSFNRHLHFTLVKDRNVATTRDYYFALAHTVRDHLVGRWIRTQQHYYDKCPKRVYYLSLEFYMGRTLQNTMINLGLQNACDEAIYQLGLDIEELEEIEEDAGLGNGGLGRLAACFLDSMATLGLAAYGYGIRYEYGIFNQKIRDGWQVEEADDWLRYGNPWEKSRPEFMLPVHFYGKVEHTNTGTKWIDTQVVLALPYDTPVPGYMNNTVNTMRLWSARAPNDFNLRDFNVGDYIQAVLDRNLAENISRVLYPNDNFFEGKELRLKQEYFVVAATLQDIIRRFKASKFGSTRGAGTVFDAFPDQVAIQLNDTHPALAIPELMRIFVDIEKLPWSKAWELTQKTFAYTNHTVLPEALERWPVDLVEKLLPRHLEIIYEINQKHLDRIVALFPKDVDRLRRMSLIEEEGSKRINMAHLCIVGSHAVNGVAKIHSDIVKTKVFKDFSELEPDKFQNKTNGITPRRWLLLCNPGLAELIAEKIGEDYVKDLSQLTKLHSFLGDDVFLRELAKVKQENKLKFSQFLETEYKVKINPSSMFDVQVKRIHEYKRQLLNCLHVITMYNRIKKDPKKLFVPRTVIIGGKAAPGYHMAKMIIKLITSVADVVNNDPMVGSKLKVIFLENYRVSLAEKVIPATDLSEQISTAGTEASGTGNMKFMLNGALTIGTMDGANVEMAEEAGEENLFIFGMRIDDVAALDKKGYEAKEYYEALPELKLVIDQIDNGFFSPKQPDLFKDIINMLFYHDRFKVFADYEAYVKCQDKVSQLYMNPKAWNTMVLKNIAASGKFSSDRTIKEYAQNIWNVEPSDLKISLSNESNKVNGN

SEQ ID NO: 122 - protein, 1960 aa, Homo Sapiens
MAQQAADKYLYVDKNFINNPLAQADWAAKKLVWVPSDKSGFEPASLKEEVGEEAIVELVENGKKVKVNKDDIQKMNPPKFSKVEDMAELTCLNEASVLHNLKERYYSGLIYTYSGLFCVVINPYKNLPIYSEEIVEMYKGKKRHEMPPHIYAITDTAYRSMMQDREDQSILCTGESGAGKTENTKKVIQYLAYVASSHKSKKDQGELERQLLQANPILEAFGNAKTVKNDNSSRFGKFIRINFDVNGYIVGANIETYLLEKSRAIRQAKEERTFHIFYYLLSGAGEHLKTDLLLEPYNKYRFLSNGHVTIPGQQDKDMFQETMEAMRIMGIPEEEQMGLLRVISGVLQLGNIVFKKERNTDQASMPDNTAAQKVSHLLGINVTDFTRGILTPRIKVGRDYVQKAQTKEQADFAIEALAKATYERMFRWLVLRINKALDKTKRQGASFIGILDIAGFEIFDLNSFEQLCINYTNEKLQQLFNHTMFILEQEEYQREGIEWNFIDFGLDLQPCIDLIEKPAGPPGILALLDEECWFPKATDKSFVEKVMQEQGTHPKFQKPKQLKDKADFCIIHYAGKVDYKADEWLMKNMDPLNDNIATLLHQSSDKFVSELWKDVDRIIGLDQVAGMSETALPGAFKTRKGMFRTVGQLYKEQLAKLMATLRNTNPNFVRCIIPNHEKKAGKLDPHLVLDQLRCNGVLEGIRICRQGFPNRVVFQEFRQRYEILTPNSIPKGFMDGKQACVLMIKALELDSNLYRIGQSKVFFRAGVLAHLEEERDLKITDVIIGFQACCRGYLARKAFAKRQQQLTAMKVLQRNCAAYLKLRNWQWWRLFTKVKPLLQVSRQEEEMMAKEEELVKVREKQLAAENRLTEMETLQSQLMAEKLQLQEQLQAETELCAEAEELRARLTAKKQELEEICHDLEARVEEEEERCQHLQAEKKKMQQNIQELEEQLEEEESARQKLQLEKVTTEAKLKKLEEEQIILEDQNCKLAKEKKLLEDRIAEFTTNLTEEEEKSKSLAKLKNKHEAMITDLEERLRREEKQRQELEKTRRKLEGDSTDLSDQIAELQAQIAELKMQLAKKEEELQAALARVEEEAAQKNMALKKIRELESQISELQEDLESERASRNKAEKQKRDLGEELEALKTELEDTLDSTAAQQELRSKREQEVNILKKTLEEEAKTHEAQIQEMRQKHSQAVEELAEQLEQTKRVKANLEKAKQTLENERGELANEVKVLLQGKGDSEHKRKKVEAQLQELQVKFNEGERVRTELADKVTKLQVELDNVTGLLSQSDSKSSKLTKDFSALESQLQDTQELLQEENRQKLSLSTKLKQVEDEKNSFREQLEEEEEAKHNLEKQIATLHAQVADMKKKMEDSVGCLETAEEVKRKLQKDLEGLSQRHEEKVAAYDKLEKTKTRLQQELDDLLVDLDHQRQSACNLEKKQKKFDQLLAEEKTISAKYAEERDRAEAEAREKETKALSLARALEEAMEQKAELERLNKQFRTEMEDLMSSKDDVGKSVHELEKSKRALEQQVEEMKTQLEELEDELQATEDAKLRLEVNLQAMKAQFERDLQGRDEQSEEKKKQLVRQVREMEAELEDERKQRSMAVAARKKLEMDLKDLEAHIDSANKNRDEAIKQLRKLQAQMKDCMRELDDTRASREEILAQAKENEKKLKSMEAEMIQLQEELAAAERAKRQAQQERDELADEIANSSGKGALALEEKRRLEARIAQLEEELEEEQGNTELINDRLKKANLQIDQINTDLNLERSHAQKNENARQQLERQNKELKVKLQEMEGTVKSKYKASITALEAKIAQLEEQLDNETKERQAACKQVRRTEKKLKDVLLQVDDERRNAEQYKDQADKASTRLKQLKRQLEEAEEEAQRANASRRKLQRELEDATETADAMNREVSSLKNKLRRGDLPFVVPRRMARKGAGDGSDEEVDGKADGAEAKPAE

SEQ ID NO: 123 - protein, 531 aa, Homo Sapiens [sequence omitted]

SEQ ID NO: 124 - protein, 701 aa, Homo Sapiens
MPRGPQPSAARCTVDDESGLGAPGRGRAGRQSWVRARASGARRDSEMQAARMAASLGRQLLRLGGGSSRLTALLGQPRPGPARRPYAGGAAQLALDKSDSHPSDALTRKKPAKAESKSFAVGMFKGQLTTDQVFPYPSVLNEEQTQFLKELVEPVSRFFEEVNDPAKNDALEMVEETTWQGLKELGAFGLQVPSELGGVGLCNTQYARLVEIVGMHDLGVGITLGAHQSIGFKGILLFGTKAQKEKYLPKLASGETVAAFCLTEPSSGSDAASIRTSAVPSPCGKYYTLNGSKLWISNGGLADIFTVFAKTPVTDPATGAVKEKITAFVVERGFGGITHGPPEKKMGIKASNTAEVFFDGVRVPSENVLGEVGSGFKVAMHILNNGRFGMAAALAGTMRGIIAKAVDHATNRTQFGEKIHNFGLIQEKLARMVMLQYVTESMAYMVSANMDQGATDFQIEAAISKIFGSEAAWKVTDECIQIMGGMGFMKEPGVERVLRDLRIFRIFEGTNDILRLFVALQGCMDKGKELSGLGSALKNPFGNAGLLLGEAGKQLRRRAGLGSGLSLSGLVHPELSRSGELAVRALEQFATVVEAKLIKHKKGIVNEQFLLQRLADGAIDLYAMVVVLSRASRSLSEGHPTAQHEKMLCDTWCIEAAARIREGMAALQSDPWQQELYRNFKSISKALVERGGVVTSNPLGF

SEQ ID NO: 125 - protein, 244 aa, Homo Sapiens
MELTIFILRLAIYILTFPLYLLNFLGLWSWICKKWFPYFLVRFTVIYNEQMASKKRELFSNLQEFAGPSGKLSLLEVGCGTGANFKFYPPGCRVTCIDPNPNFEKFLIKSIAENRHLQFERFVVAAGENMHQVADGSVDVVVCTLVLCSVKNQERILREVCRVLRPGGAFYFMEHVAAECSTWNYFWQQVLDPAWHLLFDGCNLTRESWKALERASFSKLKLQHIQAPLSWELVRPHIYGYAVK

SEQ ID NO: 126 - protein, 413 aa, Homo Sapiens
MAPPSVFAEVPQAQPVLVFKLTADFREDPDPRKVNLGVGAYRTDDCHPWVLPVVKKVEQKIANDNSLNHEYLPILGLAEFRSCASRLALGDDSPALKEKRVGGVQSLGGTGALRIGADFLARWYNGTNNKNTPVYVSSPTWENHNAVFSAAGFKDIRSYRYWDAEKRGLDLQGFLNDLENAPEFSIVVLHACAHNPTGIDPTPEQWKQIASVMKHRFLFPFFDSAYQGFASGNLERDAWAIRYFVSEGFEFFCAQSFSKNFGLYNERVGNLTVVGKEPESILQVLSQMEKIVRITWSNPPAQGARIVASTLSNPELFEEWTGNVKTMADRILTMRSELRARLEALKTPGTWNHITDQIGMFSFTGLNPKQVEYLVNEKHIYLLPSGRINVSGLTTKNLDYVATSIHEAVTKIQ

SEQ ID NO: 127 - protein, 317 aa, Homo Sapiens
MWLYLAVFVGLYYLLHWYRERQVLSHLRDKYVFITGCDSGFGKLLARQLDARGLRVLAACLTEKGAEQLRGQTSDRLETVTLDVTKTESVAAAAQWVKECVRDKGLWGLVNNAGISLPTAPNELLTKQDFVTILDVNLLGVIDVTLSLLPLVRRARGRVVNVSSVMGRVSLFGGGYCISKYGVEAFSDSLRRELSYFGVKVAMIEPGYFKTAVTSKERFLKSFLEIWDRSSPEVKEAYGEKFVADYKKSAEQMEQKCTQDLSLVTNCMEHALIACHPRTRYSAGWDAKLLYLPMSYMPTFLVDAIMYWVSPSPAKAL

SEQ ID NO: 128 - protein, 530 aa, Homo Sapiens
MSLKWTSVFLLIQLSCYFSSGSCGKVLVWPTEYSHWINMKTILEELVQRGHEVTVLTSSASTLVNASKSSAIKLEVYPTSLTKNYLEDSLLKILDRWIYGVSKNTFWSYFSQLQELCWEYYDYSNKLCKDAVLNKKLMMKLQESKFDVILADALNPCGELLAELFNIPFLYSLRFSVGYTFEKNGGGFLFPPSYVPVVMSELSDQMIFMERIKNMIHMLYFDFWFQIYDLKKWDQFYSEVLGRPTTLFETMGKAEMWLIRTYWDFEFPRPFLPNVDFVGGLHCKPAKPLPKEMEEFVQSSGENGIVVFSLGSMISNMSEESANMIASALAQIPQKVLWRFDGKKPNTLGSNTRLYKWLPQNDLLGHPKTKAFITHGGTNGIYEAIYHGIPMVGIPLFADQHDNIAHMKAKGAALSVDIRTMSSRDLLNALKSVINDPVYKENVMKLSRIHHDQPMKPLDRAVFWIEFVMRHKGAKHLRVAAHNLTWIQYHSLDVIAFLLACVATVIFIITKFCLFCFRKLAKKGKKKKRD

SEQ ID NO: 129 - protein, 349 aa, Homo Sapiens
MASKKVCIVGSGNWGSAIAKIVGGNAAQLAQFDPRVTMWVFEEDIGGKKLTEIINTQHENVKYLPGHKLPPNVVAVPDVVQAAEDADILIFVVPHQFIGKICDQLKGHLKANATGISLIKGVDEGPNGLKLISEVIGERLGIPMSVLMGANIASEVADEKFCETTIGCKDPAQGQLLKELMQTPNFRITVVQEVDTVEICGALKNVVAVGAGFCDGLGFGDNTKAAVIRLGLMEMIAFAKLFCSGPVSSATFLESCGVADLITTCYGGRNRKVAEAFARTGKSIEQLEKELLNGQKLQGPETARELYSILQHKGLVDKFPLFMAVYKVCYEGQPVGEFIHCLQNHPEHM

SEQ ID NO: 130 - protein, 300 aa, Homo Sapiens
MNIILEILLLLITIIYSYLESLVKFFIPQRRKSVAGEIVLITGAGHGIGRQTTYEFAKRQSILVLWDINKRGVEETAAECRKLGVTAHAYVVDCSNREEIYRSLNQVKKEVGDVTIVVNNAGTVYPADLLSTKDEEITKTFEVNILGHFWITKALLPSMMERNHGHIVTVASVCGHEGIPYLIPYCSSKFAAVGFHRGLTSELQALGKTGIKTSCLCPVFVNTGFTKNPSTRLWPVLETDEVVRSLIDGILTNKKMIFVPSYINIFLRLQKFLPERASAILNRMQNIQFEAVVGHKIKMK

SEQ ID NO: 131 - protein, 490 aa, Homo Sapiens
MEPFVVLVLCLSFMLLFSLWRQSCRRRKLPPGPTPLPIIGNMLQIDVKDICKSFTNFSKVYGPVFTVYFGMNPIVVFHGYEAVKEALIDNGEEFSGRGNSPISQRITKGLGIISSNGKRWKEIRRFSLTTLRNFGMGKRSIEDRVQEEAHCLVEELRKTKASPCDPTFILGCAPCNVICSVVFQKRFDYKDQNFLTLMKRFNENFRILNSPWIQVCNNFPLLIDCFPGTHNKVLKNVALTRSYIREKVKEHQASLDVNNPRDFIDCFLIKMEQEKDNQKSEFNIENLVGTVADLFVAGTETTSTTLRYGLLLLLKHPEVTAKVQEEIDHVIGRHRSPCMQDRSHMPYTDAVVHEIQRYSDLVPTGVPHAVTTDTKFRNYLIPKGTTIMALLTSVLHDDKEFPNPNIFDPGHFLDKNGNFKKSDYFMPFSAGKRICAGEGLARMELFLFLTTILQNFNLKSVDDLKNLNTTAVTKGIVSLPPSYQICFIPV

SEQ ID NO: 132 - protein, 493 aa, Homo Sapiens
MSALGVTVALLVWAAFLLLVSMWRQVHSSWNLPPGPFPLPIIGNLFQLELKNIPKSFTRLAQRFGPVFTLYVGSQRMVVMHGYKAVKEALLDYKDEFSGRGDLPAFHAHRDRGIIFNNGPTWKDIRRFSLTTLRNYGMGKQGNESRIQREAHFLLEALRKTQGQPFDPTFLIGCAPCNVIADILFRKHFDYNDEKFLRLMYLFNENFHLLSTPWLQLYNNFPSFLHYLPGSHRKVIKNVAEVKEYVSERVKEHHQSLDPNCPRDLTDCLLVEMEKEKHSAERLYTMDGITVTVADLFFAGTETTSTTLRYGLLILMKYPEIEEKLHEEIDRVIGPSRIPAIKDRQEMPYMDAVVHEIQRFITLVPSNLPHEATRDTIFRGYLIPKGTVVVPTLDSVLYDNQEFPDPEKFKPEHFLNENGKFKYSDYFKPFSTGKRVCAGEGLARMELFLLLCAILQHFNLKPLVDPKDIDLSPIHIGFGCIPPRYKLCVIPRS

SEQ ID NO: 133 - protein, 455 aa, Homo Sapiens
MTTMAAATLLRATPHFSGLAAGRTFLLQGLLRLLKAPALPLLCRGLAVEAKKTYVRDKPHVNVGTIGHVDHGKTTLTAAITKILAEGGGAKFKKYEEIDNAPEERARGITINAAHVEYSTAARHYAHTDCPGHADYVKNMITGTAPLDGCILVVAANDGPMPQTREHLLLARQIGVEHVVVYVNKADAVQDSEMVELVELEIRELLTEFGYKGEETPVIVGSALCALEGRDPELGLKSVQKLLDAVDTYIPVPARDLEKPFLLPVEAVYSVPGRGTVVTGTLERGILKKGDECELLGHSKNIRTVVTGIEMFHKSLERAEAGDNLGALVRGLKREDLRRGLVMVKPGSIKPHQKVEAQVYILSKEEGGRHKPFVSHFMPVMFSLTWDMACRIILPPEKELAMPGEDLKFNLILRQPMILEKGQRFTLRDGNRTIGTGLVTNTLAMTEEEKNIKWG

SEQ ID NO: 134 - protein, 325 aa, Homo Sapiens
MAASCVLLHTGQKMPLIGLGTWKSEPGQVKAAVKYALSVGYRHIDCAAIYGNEPEIGEALKEDVGPGKAVPREELFVTSKLWNTKHHPEDVEPALRKTLADLQLEYLDLYLMHWPYAFERGDNPFPKNADGTICYDSTHYKETWKALEALVAKGLVQALGLSNFNSRQIDDILSVASVRPAVLQVECHPYLAQNELIAHCQARGLEVTAYSPLGSSDRAWRDPDEPVLLEEPVVLALAEKYGRSPAQILLRWQVQRKVICIPKSITPSRILQNIKVFDFTFSPEEMKQLNALNKNWRYIVPMLTVDGKRVPRDAGHPLYPFNDPY

SEQ ID NO: 135 - protein, 189 aa, Homo Sapiens
MASKRALVILAKGAEEMETVIPVDVMRRAGIKVTVAGLAGKDPVQCSRDVVICPDASLEDAKKEGPYDVVVLPGGNLGAQNLSESAAVKEILKEQENRKGLIAAICAGPTALLAHEIGFGSKVTTHPLAKDKMMNGGHYTYSENRVEKDGLILTSRGPGTSFEFALAIVEALNGKEVAAQVKAPLVLKD

SEQ ID NO: 136 - protein, 301 aa, Homo Sapiens
MGAQLSTLGHMVLFPVWFLYSLLMKLFQRSTPAITLESPDIKYPLRLIDREIISHDTRRFRFALPSPQHILGLPVGQHIYLSARIDGNLVVRPYTPISSDDDKGFVDLVIKVYFKDTHPKFPAGGKMSQYLESMQIGDTIEFRGPSGLLVYQGKGKFAIRPDKKSNPIIRTVKSVGMIAGGTGITPMLQVIRAIMKDPDDHTVCHLLFANQTEKDILLRPELEELRNKHSARFKLWYTLDRAPEAWDYGQGFVNEEMIRDHLPPPEEEPLVLMCGPPPMIQYACLPNLDHVGHPTERCFVF

SEQ ID NO: 137 - protein, 337 aa, Homo Sapiens
MSSSPVKRQRMESALDQLKQFTTVVADTGDFHAIDEYKPQDATTNPSLILAAAQMPAYQELVEEAIAYGRKLGGSQEDQIKNAIDKLFVLFGAEILKKIPGRVSTEVDARLSFDKDAMVARARRLIELYKEAGISKDRILIKLSSTWEGIQAGKELEEQHGIHCNMTLLFSFAQAVACAEAGVTLISPFVGRILDWHVANTDKKSYEPLEDPGVKSVTKIYNYYKKFSYKTIVMGASFRNTGEIKALAGCDFLTISPKLLGELLQDNAKLVPVLSAKAAQASDLEKIHLDEKSFRWLHNEDQMAVEKLSDGIRKFAADAVKLERMLTERMFNAENGK

SEQ ID NO: 138 - protein, 617 aa, Homo Sapiens
MLVPLAKLSCLAYQCFHALKIKKNYLPLCATRWSSTSTVPRITTHYTIYPRDKDKRWEGVNMERFAEEADVVIVGAGPAGLSAAVRLKQLAVAHEKDIRVCLVEKAAQIGAHTLSGACLDPGAFKELFPDWKEKGAPLNTPVTEDRFGILTEKYRIPVPILPGLPMNNHGNYIVRLGHLVSWMGEQAEALGVEVYPGYAAAEVLFHDDGSVKGIATNDVGIQKDGAPKATFERGLELHAKVTIFAEGCHGHLAKQLYKKFDLRANCEPQTYGIGLKELWVIDEKNWKPGRVDHTVGWPLDRHTYGGSFLYHLNEGEPLVALGLVVGLDYQNPYLSPFREFQRWKHHPSIRPTLEGGKRIAYGARALNEGGFQSIPKLTFPGGLLIGCSPGFMNVPKIKGTHTAMKSGILAAESIFNQLTSENLQSKTIGLHVTEYEDNLKNSWVWKELYSVRNIRPSCHGVLGVYGGMIYTGIFYWILRGMEPWTLKHKGSDFERLKPAKDCTPIEYPKPDGQISFDLLSSVALSGTNHEHDQPAHLTLRDDSIPVNRNLSIYDGPEQRFCPAGVYEFVPVEQGDGFRLQINAQNCVHCKTCDIKDPSQNINWVVPEGGGGPAYNGM

SEQ ID NO: 139 - protein, 577 aa, Homo Sapiens
MHWLRKVQGLCTLWGTQMSSRTLYINSRQLVSLQWGHQEVPAKFNFASDVLDHWADMEKAGKRLPSPALWWVNGKGKELMWNFRELSENSQQAANVLSGACGLQRGDRVAVVLPRVPEWWLVILGCIRAGLIFMPGTIQMKSTDILYRLQMSKAKAIVAGDEVIQEVDTVASECPSLRIKLLVSEKSCDGWLNFKKLLNEASTTHHCVETGSQEASAIYFTSGTSGLPKMAEHSYSSLGLKAKMDAGWTGLQASDIMWTISDTGWILNILCSLMEPWALGACTFVHLLPKFDPLVILKTLSSYPIKSMMGAPIVYRMLLQQDLSSYKFPHLQNCVTVGESLLPETLENWRAQTGLDIRESYGQTETGLTCMVSKTMKIKPGYMGTAASCYDVQIIDDKGNVLPPGTEGDIGIRVKPIRPIGIFSGYVDNPDKTAANIRGDFWLLGDRGIKDEDGYFQFMGRANDIINSSGYRIGPSEVENALMEHPAVVETAVISSPDPVRGEVVKAFVVLASQFLSHDPEQLTKELQQHVKSVTAPYKYPRKIEFVLNLPKTVTGKIQRAKLRDKEWKMSGKARAQ

SEQ ID NO: 140 - protein, 334 aa, Homo Sapiens
MESYHKPDQQKLQALKDTANRLRISSIQATTAAGSGHPTSCCSAAEIMAVLFFHTMRYKSQDPRNPHNDRFVLSKGHAAPILYAVWAEAGFLAEAELLNLRKISSDLDGHPVPKQAFTDVATGSLGQGLGAACGMAYTGKYFDKASYRVYCLLGDGELSEGSVWEAMAFASIYKLDNLVAILDINRLGQSDPAPLQHQMDIYQKRCEAFGWHAIIVDGHSVEELCKAFGQAKHQPTAIIAKTFKGRGITGVEDKESWHGKPLPKNMAEQIIQEIYSQIQSKKKILATPPQEDAPSVDIANIRMPSLPSYKVGDKVQNSHPQGLRAGTGQAGPCQ

SEQ ID NO: 141 - protein, 374 aa, Homo Sapiens
MANEVIKCKAAVAWEAGKPLSIEEIEVAPPKAHEVRIKIIATAVCHTDAYTLSGADPEGCFPVILGHEGAGIVESVGEGVTKLKAGDTVIPLYIPQCGECKFCLNPKTNLCQKIRVTQGKGLMPDGTSRFTCKGKTILHYMGTSTFSEYTVVADISVAKIDPLAPLDKVCLLGCGISTGYGAAVNTAKLEPGSVCAVFGLGGVGLAVIMGCKVAGASRIIGVDINKDKFARAKEFGATECINPQDFSKPIQEVLIEMTDGGVDYSFECIGNVKVMRAALEACHKGWGVSVVVGVAASGEEIATRPFQLVTGRTWKGTAFGGWKSVESVPKLVSEYMSKKIKVDEFVTHNLSFDEINKAFELMHSGKSIRTVVKI

SEQ ID NO: 142 - protein, 410 aa, Homo Sapiens
MTCYRGFLLGSCCRVAGGRAAALRGPGAGGPAARPRLGGDGGGRRHLGQGQPRELAGCGSRADGGFRPSRVVVVAKTTRYEFEQQRYRYAELSEEDLKQLLALKGSSYSGLLERHHIHTKNVEHIIDSLRNEGIEVRLVKRREYDEETVRWADAVIAAGGDGTMLLAASKVLDRLKPVIGVNTDPERSEGHLCLPVRYTHSFPEALQKFYRGEFRWLWRQRIRLYLEGTGINPVPVDLHEQQLSLNQHNRALNIERAHDERSEASGPQLLPVRALNEVFIGESLSSRSFNINRVATQAVEDVLNIAKRQGNLSLPLNRELVEKVTNEYNESLLYSPEEPKILFSIREPIANRVFSSSRQRCFSSKVCVRSRCWDACMVVDGGTSFEFNDGAIASMMINKEDELRTVLLEQ

SEQ ID NO: 143 - protein, 200 aa, Homo Sapiens
MAKKTYDLLFKLLLIGDSGVGKTCVLFRFSDDAFNTTFISTIGIDFKIKTVELQGKKIKLQIWDTAGQERFHTITTSYYRGAMGIMLVYDITNGKSFENISKWLRNIDEHANEDVERMLLGNKCDMDDKRVVPKGKGEQIAREHGIRFFETSAKANINIEKAFLTLAEDILRKTPVKEPNSENVDISSGGGVTGWKSKCC

SEQ ID NO: 144 - protein, 205 aa, Homo Sapiens
MSSMNPEYDYLFKLLLIGDSGVGKSCLLLRFADDTYTESYISTIGVDFKIRTIELDGKTIKLQIWDTAGQERFRTITSSYYRGAHGIIVVYDVTDQESFNNVKQWLQEIDRYASENVNKLLVGNKCDLTTKKVVDYTTAKEFADSLGIPFLETSAKNATNVEQSFMTMAAEIKKRMGPGATAGGAEKSNVKIQSTPVKQSGGGCC

SEQ ID NO: 145 - protein, 368 aa, Homo Sapiens
MCTTGQVIRCKAAILWKPGAPFSIEEVEVAPPKAKEVRIKVVATGLCGTEMKVLGSKHLDLLYPTILGHEGAGIVESIGEGVSTVKPGDKVITLFLPQCGECTSCLNSEGNFCIQFKQSKTQLMSDGTSRFTCKGKSIYHFGNTSTFCEYTVIKEISVAKIDAVAPLEKVCLISCGFSTGFGAAINTAKVTPGSTCAVFGLGGVGLSVVMGCKAAGAARIIGVDVNKEKFKKAQELGATECLNPQDLKKPIQEVLFDMTDAGIDFCFEAIGNLDVLAAALASCNESYGVCVVVGVLPASVQLKISGQLFFSGRSLKGSVFGGWKSRQHIPKLVADYMAEKLNLDPLITHTLNLDKINEAVELMKTGKW

SEQ ID NO: 146 - protein, 424 aa, Homo Sapiens
MQRLQVVLGHLRGPADSGWMPQAAPCLSGAPQASAADVVVVHGRRTAICRAGRGGFKDTTPDELLSAVMTAVLKDVNLRPEQLGDICVGNVLQPGAGAIMARIAQFLSDIPETVPLSTVNRQCSSGLQAVASIAGGIRNGSYDIGMACGVESMSLADRGNPGNITSRLMEKEKARDCLIPMGITSENVAERFGISREKQDTFALASQQKAARAQSKGCFQAEIVPVTTTVHDDKGTKRSITVTQDEGIRPSTTMEGLAKLKPAFKKDGSTTAGNSSQVSDGAAAILLARRSKAEELGLPILGVLRSYAVVGVPPDIMGIGPAYAIPVALQKAGLTVSDVDIFEINEAFASQAAYCVEKLRLPPEKVNPLGGAVALGHPLGCTGARQVITLLNELKRRGKRAYGVVSMCIGTGMGAAAVFEYPGN

SEQ ID NO: 147 - protein, 325 aa, Homo Sapiens
MAAMRKALPRRLVGLASLRAVSTSSMGTLPKRVKIVEVGPRDGLQNEKNIVSTPVKIKLIDMLSEAGLSVIETTSFVSPKWVPQMGDHTEVLKGIQKFPGINYPVLTPNLKGFEAAVAAGAKEVVIFGAASELFTKKNINCSIEESFQRFDAILKAAQSANISVRGYVSCALGCPYEGKISPAKVAEVTKKFYSMGCYEISLGDTIGVGTPGIMKDMLSAVMQEVPLAALAVHCHDTYGQALANTLMALQMGVSVVDSSVAGLGGCPYAQGASGNLATEDLVYMLEGLGIHTGVNLQKLLEAGNFICQALNRKTSSKVAQATCKL

SEQ ID NO: 148 - protein, 911 aa, Homo Sapiens
MVDYHAANQSYQYGPSSAGNGAGGGGSMGDYMAQEDDWDRDLLLDPAWEKQQRKTFTAWCNSHLRKAGTQIENIDEDFRDGLKLMLLLEVISGERLPKPERGKMRVHKINNVNKALDFIASKGVKLVSIGAEEIVDGNAKMTLGMIWTIILRFAIQDISVEETSAKEGLLLWCQRKTAPYKNVNVQNFHISWKDGLAFNALIHRHRPELIEYDKLRKDDPVTNLNNAFEVAEKYLDIPKMLDAEDIVNTARPDEKAIMTYVSSFYHAFSGAQKAETAANRICKVLAVNQENEHLMEDYEKLASDLLEWIRRTIPWLEDRVPQKTIQEMQQKLEDFRDYRRVHKPPKVQEKCQLEINFNTLQTKLRLSNRPAFMPSEGKMVSDINNGWQHLEQAEKGYEEWLLNEIRRLERLDHLAEKFRQKASIHEAWTDGKEAMLKHRDYETATLSDIKALIRKHEAFESDLAAHQDRVEQIAAIAQELNELDYYDSHNVNTRCQKICDQWDALGSLTHSRREALEKTEKQLEAIDQLHLEYAKRAAPFNNWMESAMEDLQDMFIVHTIEEIEGLISAHDQFKSTLPDADREREAILAIHKEAQRIAESNHIKLSGSNPYTTVTPQIINSKWEKVQQLVPKRDHALLEEQSKQQSNEHLRRQFASQANVVGPWIQTKMEEIGRISIEMNGTLEDQLSHLKQYERSIVDYKPNLDLLEQQHQLIQEALIFDNKHTNYTMEHIRVGWEQLLTTIARTINEVENQILTRDAKGISQEQMQEFRASFNHFDKDHGGALGPEEFKACLISLGYDVENDRQGEAEFNRIMSLVDPNHSGLVTFQAFIDFMSRETTDTDTADQVIASFKVLAGDKNFITAEELRRELPPDQAEYCIARMAPYQGPDAVPGALDYKSFSTALYGESDL

SEQ ID NO: 149 - protein, 119 aa, Homo Sapiens [sequence omitted]

SEQ ID NO: 150 - protein, 237 aa, Homo Sapiens
MAAVRVLVASRLAAASAFTSLSPGGRTPSQRAALHLSVPRPAARVALVLSGCGVYDGTEIHEASAILVHLSRGGAEVQIFAPDVPQMHVIDHTKGQPSEGESRNVLTESARIARGKITDLANLSAANHDAAIFPGGFGAAKNLLCCIAPVLAAKVLRGVEVTVGHEQEEGGKWPYAGTAEAIKALGAKHCVKEVVEAHVDQKNKVVTTPAFMCETALHYIHDGIGAMVRKVLELTGK

SEQ ID NO: 151 - protein, 646 aa, Homo Sapiens
MPVIPATREAEAGELLEPGRQRLQPAEMAPSHSSLLFPVMEAPAAGLFLLLLLGTWAPAPGSASSEAPPLINEDVKRTVDLSSHLAKVTAEVVLAHLGGGSTSRATSFLLALEPELEARLAHLGVQVKGEDEEENNLEVRETKIKGKSGRFFTVKLPVALDPGAKISVIVETVYTHVLHPYPTQITQSEKQFVVFEGNHYFYSPYPTKTQTMRVKLASRNVESYTKLGNPTRSEDLLDYGPFRDVPAYSQDTFKVHYENNSPFLTITSMTRVIEVSHWGNIAVEENVDLKHTGAVLKGPFSRYDYQRQPDSGISSIRSFKTILPAAAQDVYYRDEIGNVSTSHLLILDDSVEMEIRPRFPLFGGWKTHYIVGYNLPSYEYLYNLGDQYALKMRFVDHVFDEQVIDSLTVKIILPEGAKNIEIDSPYEISRAPDELHYTYLDTFGRPVIVAYKKNLVEQHIQDIVVHYTFNKVLMLQEPLLVVAAFYILFFTVIIYVRLDFSITKDPAAEARMKVACITEQVLTLVNKRIGLYRHFDETVNRYKQSRDISTLNSGKKSLETEHKALTSEIALLQSRLKTEGSDLCDRVSEMQKLDAQVKELVLKSAVEAERLVAGKLKKDTYIENEKLISGKRQELVTKIDHILDAL

SEQ ID NO: 152 - protein, 490 aa, Homo Sapiens [sequence omitted]

SEQ ID NO: 153 - protein, 483 aa, Homo Sapiens
MAQADIALIGLAVMGQNLILNMNDHGFVVCAFNRTVSKVDDFLANEAKGTKVVGAQSLKEMVSKLKKPRRIILLVKAGQAVDDFIEKLVPLLDTGDIIIDGGNSEYRDTTRRCRDLKAKGILFVGSGVSGGEEGARYGPSLMPGGNKEAWPHIKTIFQGIAAKVGTGEPCCDWVGDEGAGHFVKMVHNGIEYGDMQLICEAYHLMKDVLGMAQDEMAQAFEDWNKTELDSFLIEITANILKFQDTDGKHLLPKIRDSAGQKGTGKWTAISALEYGVPVTLIGEAVFARCLSSLKDERIQASKKLKGPQKFQFDGDKKSFLEDIRKALYASKIISYAQGFMLLRQAATEFGWTLNYGGIALMWRGGCIIRSVFLGKIKDAFDRNPELQNLLLDDFFKSAVENCQDSWRRAVSTGVQAGIPMPCFTTALSFYDGYRHEMLPASLIQAQRDYFGAHTYELLAKPGQFIHTNWTGHGGTVSSSSYNA

SEQ ID NO: 154 - protein, 416 aa, Homo Sapiens
MSEADGLRQRRPLRPQVVTDDDGQAPEAKDGSSFSGRVFRVTFLMLAVSLTVPLLGAMMLLESPIDPQPLSFKEPPLLLGVLHPNTKLRQAERLFENQLVGPESIAHIGDVMFTGTADGRVVKLENGEIETIARFGSGPCKTRDDEPVCGRPLGIRAGPNGTLFVADAYKGLFEVNPWKREVKLLLSSETPIEGKNMSFVNDLTVTQDGRKIYFTDSSSKWQRRDYLLLVMEGTDDGRLLEYDTVTREVKVLLDQLRFPNGVQLSPAEDFVLVAETTMARIRRVYVSGLMKGGADLFVENMPGFPDNIRPSSSGGYWVGMSTIRPNPGFSMLDFLSERPWIKRMIFKLFSQETVMKFVPRYSLVLELSDSGAFRRSLHDPDGLVATYISEVHEHDGHLYLGSFRSPFLCRLSLQAV

SEQ ID NO: 155 - protein, 130 aa, Homo Sapiens [sequence omitted]

SEQ ID NO: 156 - protein, 292 aa, Homo Sapiens
MAFMKKYLLPILGLFMAYYYYSANEEFRPEMLQGKKVIVTGASKGIGREMAYHLAKMGAHVVVTARSKETLQKVVSHCLELGAASAHYIAGTMEDMTFAEQFVAQAGKLMGGLDMLILNHITNTSLNLFHDDIHHVRKSMEVNFLSYVVLTVAALPMLKQSNGSIVVVSSLAGKVAYPMVAAYSASKFALDGFFSSIRKEYSVSRVNVSITLCVLGLIDTETAMKAVSGIVHMQAAPKEECALEIIKGGALRQEEVYYDSSLWTTLLIRNPCRKILEFLYSTSYNMDRFINK

SEQ ID NO: 157 - protein, 219 aa, Homo Sapiens
MSGLSGPPARRGPFPLALLLLFLLGPRLVLAISFHLPINSRKCLREEIHKDLLVTGAYEISDQSGGAGGLRSHLKITDSAGHILYSKEDATKGKFAFTTEDYDMFEVCFESKGTGRIPDQLVILDMKHGVEAKNYEEIAKVEKLKPLEVELRRLEDLSESIVNDFAYMKKREEEMRDTNESTNTRVLYFSIFSMFCLIGLATWQVFYLRRFFKAKKLIE

SEQ ID NO: 158 - protein, 317 aa, Homo Sapiens [sequence omitted]

SEQ ID NO: 159 - protein, 216 aa, Homo Sapiens
MAAQGEPQVQFKLVLVGDGGTGKTTFVKRHLTGEFEKKYVATLGVEVHPLVFHTNRGPIKFNVWDTAGQEKFGGLRDGYYIQAQCAIIMFDVTSRVTYKNVPNWHRDLVRVCENIPIVLCGNKVDIKDRKVKAKSIVFHRKKNLQYYDISAKSNYNFEKPFLWLARKLIGDPNLEFVAMPALAPPEVVMDPALAAQYEHDLEVAQTTALPDEDDDL

SEQ ID NO: 160 - protein, 297 aa, Homo Sapiens
MASPQLCRALVSAQWVAEALRAPRAGQPLQLLDASWYLPKLGRDARREFEERHIPGAAFFDIDQCSDRTSPYDHMLPGAEHFAEYAGRLGVGAATHVVIYDASDQGLYSAPRVWWMFRAFGHHAVSLLDGGLRHWLRQNLPLSSGKSQPAPAEFRAQLDPAFIKTYEDIKENLESRRFQVVDSRATGRFRGTEPEPRDGIEPGHIPGTVNIPFTDFLSQEGLEKSPEEIRHLFQEKKVDLSKPLVATCGSGVTACHVALGAYLCGKPDVPIYDGSWVEWYMRARPEDVISEGRGKTH

SEQ ID NO: 161 - protein, 2386 aa, Homo Sapiens
MLRGPGPGLLLLAVQCLGTAVPSTGASKSKRQAQQMVQPQSPVAVSQSKPGCYDNGKHYQINQQWERTYLGNALVCTCYGGSRGFNCESKPEAEETCFDKYTGNTYRVGDTYERPKDSMIWDCTCIGAGRGRISCTIANRCHEGGQSYKIGDTWRRPHETGGYMLECVCLGNGKGEWTCKPIAEKCFDHAAGTSYVVGETWEKPYQGWMMVDCTCLGEGSGRITCTSRNRCNDQDTRTSYRIGDTWSKKDNRGNLLQCICTGNGRGEWKCERHTSVQTTSSGSGPFTDVRAAVYQPQPHPQPPPYGHCVTDSGVVYSVGMQWLKTQGNKQMLCTCLGNGVSCQETAVTQTYGGNSNGEPCVLPFTYNGRTFYSCTTEGRQDGHLWCSTTSNYEQDQKYSFCTDHTVLVQTRGGNSNGALCHFPFLYNNHNYTDCTSEGRRDNMKWCGTTQNYDADQKFGFCPMAAHEEICTTNEGVMYRIGDQWDKQHDMGHMMRCTCVGNGRGEWTCIAYSQLRDQCIVDDITYNVNDTFHKRHEEGHMLNCTCFGQGRGRWKCDPVDQCQDSETGTFYQIGDSWEKYVHGVRYQCYCYGRGIGEWHCQPLQTYPSSSGPVEVFITETPSQPNSHPIQWNAPQPSHISKYILRWRPKNSVGRWKEATIPGHLNSYTIKGLKPGVVYEGQLISIQQYGHQEVTRFDFTTTSTSTPVTSNTVTGETTPFSPLVATSESVTEITASSFVVSWVSASDTVSGFRVEYELSEEGDEPQYLDLPSTATSVNIPDLLPGRKYIVNVYQISEDGEQSLILSTSQTTAPDAPPDTTVDQVDDTSIVVRWSRPQAPITGYRIVYSPSVEGSSTELNLPETANSVTLSDLQPGVQYNITIYAVEENQESTPVVIQQETTGTPRSDTVPSPRDLQFVEVTDVKVTIMWTPPESAVTGYRVDVIPVNLPGEHGQRLPISRNTFAEVTGLSPGVTYYFKVFAVSHGRESKPLTAQQTTKLDAPTNLQFVNETDSTVLVRWTPPRAQITGYRLTVGLTRRGQPRQYNVGPSVSKYPLRNLQPASEYTVSLVAIKGNQESPKATGVFTTLQPGSSIPPYNTEVTETTIVITWTPAPRIGFKLGVRPSQGGEAPREVTSDSGSIVVSGLTPGVEYVYTIQVLRDGQERDAPIVNKVVTPLSPPTNLHLEANPDTGVLTVSWERSTTPDITGYRITTTPTNGQQGNSLEEVVHADQSSCTFDNLSPGLEYNVSVYTVKDDKESVPISDTIIPEVPQLTDLSFVDITDSSIGLRWTPLNSSTIIGYRITVVAAGEGIPIFEDFVDSSVGYYTVTGLEPGIDYDISVITLINGGESAPTTLTQQTAVPPPTDLRFSDITANSFTVHWIAPRATITGYRIRHHPEHFSGRPREDRVPHSRNSITLTNLTPGTEYVVSIVALNGREESPLLIGQQSTVSDVPRDLEVVAATPTSLLISWDAPAVTVRYYRITYGETGGNSPVQEFTVPGSKSTATISGLKPGVDYTITVYAVTGRGDSPASSKPISINYRTEIDKPSQMQVTDVQDNSISVKWLPSSSPVTGYRVTTTPKNGPGPTKTKTAGPDQTEMTIEGLQPTVEYVVSVYAQNPSGESQPLVQTAVTNIDRPKGLAFTDVDVDSIKIAWESPQGQVSRYRVTYSSPEDGIHELFPAPDGEEDTAELQGLRPGSEYTVSVVALHDDMESQPLIGTQSTAIPAPTDLKFTQVTPTSLSAQWTPPNVQLTGYRVRVTPKEKTGPMKEINLAPDSSSVVVSGLMVATKYEVSVYALKDTLTSRPAQGVVTTLENVSPPRRARVTDATETTITISWRTKTETITGFQVDAVPANGQTPIQRTIKPDVRSYTITGLQPGTDYKIYLYTLNDNARSSPVVIDASTAIDAPSNLRFLATTPNSLLVSWQPPRARITGYIIKYEKPGSPPREVVPRPRPGVTEATITGLEPGTEYTIYVIALKNNQKSEPLIGRKKTDELPQLVTLPHPNLHGPEILDVPSTVQKTPFVTHPGYDTGNGIQLPGTSGQQPSVGQQMIFEEHGFRRTTPPTTATPIRHRPRPYPPNVGEEIQIGHIPREDVDYHLYPHGPGLNPNASTGQEALSQTTISWAPFQDTSEYIISCHPVGTDEEPLQFRVPGTSTSATLTGLTRGATYNVIVEALKDQQRHKVREEVVTVGNSVNEGLNQPTDDSCFDPYTVSHYAVGDEWERMSESGFKLLCQCLGFGSGHFRCDSSRWCHDNGVNYKIGEKWDRQGENGQMMSCTCLGNGKGEFKCDPHEATCYDDGKTYHVGEQWQKEYLGAICSCTCFGGQRGWRCDNCRRPGGEPSPEGTTGQSYNQYSQRYHQRTNTNVNCPIECFMPLDVQADREDSRE

SEQ ID NO: 162 - protein, 731 aa, Homo Sapiens
MPTGFVAPILCVLLPSPTREAATVASATGDSASERESAAPAAAPTAEAPPPSVVTRPEPQALPSPAIRAPLPDLYPFGTMRGGGFGDRDRDRDRGGFGARGGGGLPPKKFGNPGERLRKKKWDLSELPKFEKNFYVEHPEVARLTPYEVDELRRKKEITVRGGDVCPKPVFAFHHANFPQYVMDVLMDQHFTEPTPIQCQGFPLALSGRDMVGIAQTGSGKTLAYLLPAIVHINHQPYLERGDGPICLVLAPTRELAQQVQQVADDYGKCSRLKSTCIYGGAPKGPQIRDLERGVEICIATPGRLIDFLESGKTNLRRCTYLVLDEADRMLDMGFEPQIRKIVDQIRPDRQTLMWSATWPKEVRQLAEDFLRDYTQINVGNLELSANHNILQIVDVCMESEKDHKLIQLMEEIMAEKENKTIIFVETKRRCDDLTRRMRRDGWPAMCIHGDKSQPERDWVLNEFRSGKAPILIATDVASRGLDVEDVKFVINYDYPNSSEDYVHRIGRTARSTNKGTAYTFFTPGNLKQARELIKVLEEANQAINPKLMQLVDHRGGGGGGGKGGRSRYRTTSSANNPNLMYQDECDRRLRGVKDGGRRDSASYRDRSETDRAGYANGSGYGSPNSAFGAQAGQYTYGQGTYGAAAYGTSSYTAQEYGAGTYGASSTTSTGRSSQSSSQQFSGIGRSGQQPQPLMSQQFAQPPGATNMIGYMGQTAYQYPPPPPPPPPSRK

SEQ ID NO: 163 - protein, 243 aa, Homo Sapiens
MAVQISKKRKFVADGIFKAELNEFLTRELAEDGYSGVEVRVTPTRTEIIILATRTQNVLGEKGRRIRELTAVVQKRFGFPEGSVELYAEKVATRGLCAIAQAESLRYKLLGGLAVRRACYGVLRFIMESGAKGCEVVVSGKLRGQRAKSMKFVDGLMIHSGDPVNYYVDTAVRHVLLRQGVLGIKVKIMLPWDPTGKIGPKKPLPDHVSIVEPKDEILPTTPISEQKGGKPEPPAMPQPVPTA

SEQ ID NO: 164 - protein, 132 aa, Homo Sapiens [sequence omitted]

SEQ ID NO: 165 - protein, 616 aa, Homo Sapiens
MSGVRGLSRLLSARRLALAKAWPTVLQTGTRGFHFTVDGNKRASAKVSDSISAQYPVVDHEFDAVVVGAGGAGLRAAFGLSEAGFNTACVTKLFPTRSHTVAAQLENYGMPFSRTEDGKIYQRAFGGQSLKFGKGGQAHRCCCVADRTGHSLLHTLYGRSLRYDTSYFVEYFALDLLMENGECRGVIALCIEDGSIHRIRAKNTVVATGGYGRTYFSCTSAHTSTGDGTAMITRAGLPCQDLEFVQFHPTGIYGAGCLITEGCRGEGGILINSQGERFMERYAPVAKDLASRDVVSRSMTLEIREGRGCGPEKDHVYLQLHHLPPEQLATRLPGISETAMIFAGVDVTKEPIPVLPTVHYNMGGIPTNYKGQVLRHVNGQDQIVPGLYACGEAACASVHGANRLGANSLLDLVVFGRACALSIEESCRPGDKVPPIKPNAGEESVMNLDKLRFADGSIRTSELRLSMQKSMQNHAAVFRVGSVLQEGCGKISKLYGDLKHLKTFDRGMVWNTDLVETLELQNLMLCALQTIYGAEARKESRGAHAREDYKVRIDEYDYSKPIQGQQKKPFEEHWRKHTLSYVDVGTGKVTLEYRPVIDKTLNEADCATVPPAIRSY

SEQ ID NO: 166 - protein, 616 aa, Homo Sapiens; identical to SEQ ID NO: 165

SEQ ID NO: 167 - protein, 533 aa, Homo Sapiens
MAFANLRKVLISDSLDPCCRKILQDGGLQVVEKQNLSKEELIAELQDCEGLIVRSATKVTADVINAAEKLQVVGRAGTGVDNVDLEAATRKGILVMNTPNGNSLSAAELTCGMIMCLARQIPQATASMKDGKWERKKFMGTELNGKTLGILGLGRIGREVATRMQSFGMKTIGYDPIISPEVSASFGVQQLPLEEIWPLCDFITVHTPLLPSTTGLLNDNTFAQCKKGVRVVNCARGGIVDEGALLRALQSGQCAGAALDVFTEEPPRDRALVDHENVISCPHLGASTKEAQSRCGEEIAVQFVDMVKGKSLTGVVNAQALTSAFSPHTKPWIGLAEALGTLMRAWAGSPKGTIQVITQGTSLKNAGNCLSPAVIVGLLKEASKQADVNLVNAKLLVKEAGLNVTTSHSPAAPGEQGFGECLLAVALAGAPYQAVGLVQGTTPVLQGLNGAVFRPEVPLRRDLPLLLFRTQTSDPAMLPTMIGLLAEAGVRLLSYQTSLVSDGETWHVMGISSLLPSLEAWKQHVTEAFQFHF

SEQ ID NO: 168 - protein, 369 aa, Homo Sapiens
MDPRKVNELRAFVKMCKQDPSVLHTEEMRFLREWVESMGGKVPPATQKAKSEENTKEEKPDSKKVEEDLKADEPSSEESDLEIDKEGVIEPDTDAPQEMGDENAEITEEMMDQANDKKVAAIEALNDGELQKAIDLFTDAIKLNPRLAILYAKRASVFVKLQKPNAAIRDCDRAIEINPDSAQPYKWRGKAHRLLGHWEEAAHDLALACKLDYDEDASAMLKEVQPRAQKIAEHRRKYERKREEREIKERIERVKKAREEHERAQREEEARRQSGAQYGSFPGGFPGGMPGNFPGGMPGMGGGMPGMAGMPGLNEILSDPEVLAAMQDPEVMVAFQDVAQNPANMSKYQSNPKVMNLISKLSAKFGGQA

SEQ ID NO: 169 - protein, 151 aa, Homo Sapiens [sequence omitted]

SEQ ID NO: 170 - protein, 245 aa, Homo Sapiens
MANEAYPCPCDIGHRLEYGGLGREVQVEHIKAYVTKSPVDAGKAVIVIQDIFGWQLPNTRYIADMISGNGYTTIVPDFFVGQEPWDPSGDWSIFPEWLKTRNAQKIDREISAILKYLKQQCHAQKIGIVGFCWGGTAVHHLMMKYSEFRAGVSVYGIVKDSEDIYNLKNPTLFIFAENDVVIPLKDVSLLTQKLKEHCKVEYQIKTFSGQTHGFVHRKREDCSPADKPYIDEARRNLIEWLNKYM

SEQ ID NO: 171 - protein, 232 aa, Homo Sapiens
MAGITTIEAVKRKIQVLQQQADDAEERAERLQREVEGERRAREQAEAEVASLNRRIQLVEEELDRAQERLATALQKLEEAEKAADEKKMELQEIQLKEAKHIAEEADRKYEEVARKLVIIEGDLERTEERAELAESRCREMDEQIRLMDQNLKCLSAAEEKYSQKEDKYEEEIKILTDKLKEAETRAEFAERSVAKLEKTIDDLEDKLKCTKEEHLCTQRMLDQTLLDLNEM

SEQ ID NO: 172 - protein, 1675 aa, Homo Sapiens
MAQILPIRFQEHLQLQNLGINPANIGFSTLTMESDKFICIREKVGEQAQVVIIDMNDPSNPIRRPISADSAIMNPASKVIALKAGKTLQIFNIEMKSKMKAHTMTDDVTFWKWISLNTVALVTDNAVYHWSMEGESQPVKMFDRHSSLAGCQIINYRTDAKQKWLLLTGISAQQNRVVGAMQLYSVDRKVSQPIEGHAASFAQFKMEGNAEESTLFCFAVRGQAGGKLHIIEVGTPPTGNQPFPKKAVDVFFPPEAQNDFPVAMQISEKHDVVFLITKYGYIHLYDLETGTCIYMNRISGETIFVTAPHEATAGIIGVNRKGQVLSVCVEEENIIPYITNVLQNPDLALRMAVRNNLAGAEELFARKFNALFAQGNYSEAAKVAANAPKGILRTPDTIRRFQSVPAQPGQTSPLLQYFGILLDQGQLNKYESLELCRPVLQQGRKQLLEKWLKEDKLECSEELGDLVKSVDPTLALSVYLRANVPNKVIQCFAETGQVQKIVLYAKKVGYTPDWIFLLRNVMRISPDQGQQFAQMLVQDEEPLADITQIVDVFMEYNLIQQCTAFLLDALKNNRPSEGPLQTRLLEMNLMHAPQVADAILGNQMFTHYDRAHIAQLCEKAGLLQRALEHFTDLYDIKRAVVHTHLLNPEWLVNYFGSLSVEDSLECLRAMLSANIRQNLQICVQVASKYHEQLSTQSLIELFESFKSFEGLFYFLGSIVNFSQDPDVHFKYIQAACKTGQIKEVERICRESNCYDPERVKNFLKEAKLTDQLPLIIVCDRFDFVHDLVLYLYRNNLQKYIEIYVQKVNPSRLPVVIGGLLDVDCSEDVIKNLILVVRGQFSTDELVAEVEKRNRLKLLLPWLEARIHEGCEEPATHNALAKIYIDSNNNPERFLRENPYYDSRVVGKYCEKRDPHLACVAYERGQCDLELINVCNENSLFKSLSRYLVRRKDPELWGSVLLESNPYRRPLIDQVVQTALSETQDPEEVSVTVKAFMTADLPNELIELLEKIVLDNSVFSEHRNLQNLLILTAIKADRTRVMEYINRLDNYDAPDIANIAISNELFEEAFAIFRKFDVNTSAVQVLIEHIGNLDRAYEFAERCNEPAVWSQLAKAQLQKGMVKEAIDSYIKADDPSSYMEVVQAANTSGNWEELVKYLQMARKKARESYVETELIFALAKTNRLAELEEFINGPNNAHIQQVGDRCYDEKMYDAAKLLYNNVSNFGRLASTLVHLGEYQAAVDGARKANSTRTWKEVCFACVDGKEFRLAQMCGLHIVVHADELEELINYYQDRGYFEELITMLEAALGLERAHMGMFTELAILYSKFKPQKMREHLELFWSRVNIPKVLRAAEQAHLWAELVFLYDKYEEYDNAIITMMNHPTDAWKEGQFKDIITKVANVELYYRAIQFYLEFKPLLLNDLLMVLSPRLDHTRAVNYFSKVKQLPLVKPYLRSVQNHNNKSVNESLNNLFITEEDYQALRTSIDAYDNFDNISLAQRLEKHELIEFRRIAAYLFKGNNRWKQSVELCKKDSLYKDAMQYASESKDTELAEELLQWFLQEEKRECFGACLFTCYDLLRPDVVLETAWRHNIMDFAMPYFIQVMKEYLTKVDKLDASESLRKEEEQATETQPIVYGQPQLMLTAGPSVAVPPQAPFGYGYTAPPYGQPQPGFGYSM

SEQ ID NO: 173 - protein, 1995 aa, Homo Sapiens
MAAVTMSVPGRKAPPRPGPVPEAAQPFLFTPRGPSAGGGPGSGTSPQVEWTARRLVWVPSELHGFEAAALRDEGEEEAEVELAESGRRLRLPRDQIQRMNPPKFSKAEDMAELTCLNEASVLHNLRERYYSGLIYTYSGLFCVVINPYKQLPIYTEAIVEMYRGKKRHEVPPHVYAVTEGAYRSMLQDREDQSILCTGESGAGKTENTKKVIQYLAHVASSPKGRKEPGVPGELERQLLQANPILEAFGNAKTVKNDNSSRFGKFIRINFDVAGYIVGANIETYLLEKSRAIRQAKDECSFHIFYQLLGGAGEQLKADLLLEPCSHYRFLTNGPSSSPGQERELFQETLESLRVLGFSHEEIISMLRMVSAVLQFGNIALKRERNTDQATMPDNTAAQKLCRLLGLGVTDFSRALLTPRIKVGRDYVQKAQTKEQADFALEALAKATYERLFRWLVLRLNRALDRSPRQGASFLGILDIAGFEIFQLNSFEQLCINYTNEKLQQLFNHTMFVLEQEEYQREGIPWTFLDFGLDLQPCIDLIERPANPPGLLALLDEECWFPKATDKSFVEKVAQEQGGHPKFQRPRHLRDQADFSVLHYAGKVDYKANEWLMKNMDPLNDNVAALLHQSTDRLTAEIWKDVEGIVGLEQVSSLGDGPPGGRPRRGMFRTVGQLYKESLSRLMATLSNTNPSFVRCIVPNHEKRAGKLEPRLVLDQLRCNGVLEGIRICRQGFPNRILFQEFRQRYEILTPNAIPKGFMDGKQACEKMIQALELDPNLYRVGQSKIFFRAGVLAQLEEERDLKVTDIIVSFQAAARGYLARRAFQKRQQQQSALRVMQRNCAAYLKLRHWQWWRLFTKVKPLLQVTRQDEVLQARAQELQKVQELQQQSAREVGELQGRVAQLEEERARLAEQLRAEAELCAEAEETRGRLAARKQELELVVSELEARVGEEEECSRQMQTEKKRLQQHIQELEAHLEAEEGARQKLQLEKVTTEAKMKKFEEDLLLLEDQNSKLSKERKLLEDRLAEFSSQAAEEEEKVKSLNKLRLKYEATIADMEDRLRKEEKGRQELEKLKRRLDGESSELQEQMVEQQQRAEELRAQLGRKEEELQAALARAEDEGGARAQLLKSLREAQAALAEAQEDLESERVARTKAEKQRRDLGEELEALRGELEDTLDSTNAQQELRSKREQEVTELKKTLEEETRIHEAAVQELRQRHGQALGELAEQLEQARRGKGAWEKTRLALEAEVSELRAELSSLQTARQEGEQRRRRLELQLQEVQGRAGDGERARAEAAEKLQRAQAELENVSGALNEAESKTIRLSKELSSTEAQLHDAQELLQEETRAKLALGSRVRAMEAEAAGLREQLEEEAAARERAGRELQTAQAQLSEWRRRQEEEAGALEAGEEARRRAAREAEALTQRLAEKTETVDRLERGRRRLQQELDDATMDLEQQRQLVSTLEKKQRKFDQLLAEEKAAVLRAVEERERAEAEGREREARALSLTRALEEEQEAREELERQNRALRAELEALLSSKDDVGKSVHELERACRVAEQAANDLRAQVTELEDELTAAEDAKLRLEVTVQALKTQHERDLQGRDEAGEERRRQLAKQLRDAEVERDEERKQRTLAVAARKKLEGELEELKAQMASAGQGKEEAVKQLRKMQAQMKELWREVEETRTSREEIFSQNRESEKRLKGLEAEVLRLQEELAASDRARRQAQQDRDEMADEVANGNLSKAAILEEKRQLEGRLGQLEEELEEEQSNSELLNDRYRKLLLQVESLTTELSAERSFSAKAESGRQQLERQIQELRGRLGEEDAGARARHKMTIAALESKLAQAEEQLEQETRERILSGKLVRRAEKRLKEVVLQVEEERRVADQLRDQLEKGNLRVKQLKRQLEEAEEEASRAQAGRRRLQRELEDVTESAESMNREVTTLRNRLRRGPLTFTTRTVRQVFRLEEGVASDEEAEEAQPGSGPSPEPEGSPPAHPQ

SEQ ID NO: 174 - protein, 572 aa, Homo Sapiens [sequence omitted]

SEQ ID NO: 175 - protein, 613 aa, Homo Sapiens
MFRCGGLAAGALKQKLVPLVRTVCVRSPRQRNRLPGNLFQRWHVPLELQMTRQMASSGASGGKIDNSVLVLIVGLSTVGAGAYAYKTMKEDEKRYNERISGLGLTPEQKQKKAALSASEGEEVPQDKAPSHVPFLLIGGGTAAFAAARSIRARDPGARVLIVSEDPELPYMRPPLSKELWFSDDPNVTKTLRFKQWNGKERSIYFQPPSFYVSAQDLPHIENGGVAVLTGKKVVQLDVRDNMVKLNDGSQITYEKCLIATGGTPRSLSAIDRAGAEVKSRTTLFRKIGDFRSLEKISREVKSITIIGGGFLGSELACALGRKARALGTEVIQLFPEKGNMGKILPEYLSNWTMEKVRREGVKVMPNAIVQSVGVSSGKLLIKLKDGRKVETDHIVAAVGLEPNVELAKTGGLEIDSDFGGFRVNAELQARSNIWVAGDAACFYDIKLGRRRVEHHDHAVVSGRLAGENMTGAAKPYWHQSMFWSDLGPDVGYEAIGLVDSSLPTVGVFAKATAQDNPKSATEQSGTGIRSESETESEASEITIPPSTPAVPQAPVQGEDYGKGVIFYLRDKVVVGIVLWNIFNRMPIARKIIKDGEQHEDLNEVAKLFNIHED

SEQ ID NO: 176 - protein, 352 aa, Homo Sapiens
MLRLLASGCARGPGPGVGARPAAGLFHPGRRQSRQASDAPRNQPPSPEFVARPVGVCSMMRLPVQTSPEGLDAAFIGVPLDTGTSNRPGARFGPRRIREESVMLGTVNPSTGALPFQSLMVADLGDVNVNLYNLQDSCRRIQEAYEKIVAAGCIPLTLGGDHTITYPILQAMAKKHGPVGLLHVDAHTDTTDKALGEKLYHGAPFRRCVDEGLLDCKRVVQIGIRGSSTTLDPYRYNRSQGFRVVLAEDCWMKSLVPLMGEVRQQMGGKPIYISFDIDALDPAYAPGTGTPEIAGLTPSQALEIIRGCQGLNVMGCDLVEVSPPYDLSGNTALLAANLLFEMLCALPKVTTV

SEQ ID NO: 177 - protein, 432 aa, Homo Sapiens
MEGLAVRLLRGSRLLRRNFLTCLSSWKIPPHVSKSSQSEALLNITNNGIHFAPLQTFTDEEMMIKSSVKKFAQEQIAPLVSTMDENSKMEKSVIQGLFQQGLMGIEVDPEYGGTGASFLSTVLVIEELAKVDASVAVFCEIQNTLINTLIRKHGTEEQKATYLPQLTTEKVGSFCLSEAGAGSDSFALKTRADKEGDYYVLNGSKMWISSAEHAGLFLVMANVDPTIGYKGITSFLVDRDTPGLHIGKPENKLGLRASSTCPLTFENVKVPEANILGQIGHGYKYAIGSLNEGRIGIAAQMLGLAQGCFDYTIPYIKERIQFGKRLFDFQGLQHQVAHVATQLEAARLLTYNAARLLEAGKPFIKEASMAKYYASEIAGQTTSKCIEWMGGVGYTKDYPVEKYFRDAKIGTIYEGASNIQLNTIAKHIDAEY

SEQ ID NO: 178 - protein, 519 aa, Homo Sapiens
MFLLPLPAAGRVVVRRLAVRRFGSRSLSTADMTKGLVLGIYSKEKEDDVPQFTSAGENFDKLLAGKLRETLNISGPPLKAGKTRTFYGLHQDFPSVVLVGLGKKAAGIDEQENWHEGKENIRAAVAAGCRQIQDLELSSVEVDPCGDAQAAAEGAVLGLYEYDDLKQKKKMAVSAKLYGSGDQEAWQKGVLFASGQNLARQLMETPANEMTPTRFAEIIEKNLKSASSKTEVHIRPKSWIEEQAMGSFLSVAKGSDEPPVFLEIHYKGSPNANEPPLVFVGKGITFDSGGISIKASANMDLMRADMGGAATICSAIVSAAKLNLPINIIGLAPLCENMPSGKANKPGDVVRAKNGKTIQVDNTDAEGRLILADALCYAHTFNPKVILNAATLTGAMDVALGSGATGVFTNSSWLWNKLFEASIETGDRVWRMPLFEHYTRQVVDCQLADVNNIGKYRSAGACTAAAFLKEFVTHPKWAHLDIAGVMTNKDEVPYLRKGMTGRPTRTLIEFLLRFSQDNA

SEQ ID NO: 179 - protein, 463 aa, Homo Sapiens
METEQPEETFPNTETNGEFGKRPAEDMEEEQAFKRSRNTDEMVELRILLQSKNAGAVIGKGGKNIKALRTDYNASVSVPDSSGPERILSISADIETIGEILKKIIPTLEEGLQLPSPTATSQLPLESDAVECLNYQHYKGSDFDCELRLLIHQSLAGGIIGVKGAKIKELRENTQTTIKLFQECCPHSTDRVVLIGGKPDRVVECIKIILDLISESPIKGRAQPYDPNFYDETYDYGGFTMMFDDRRGRPVGFPMRGRGGFDRMPPGRGGRPMPPSRRDYDDMSPRRGPPPPPPGRGGRGGSRARNLPLPPPPPPRGGDLMAYDRRGRPGDRYDGMVGFSADETWDSAIDTWSPSEWQMAYEPQGGSGYDYSYAGGRGSYGDLGGPIITTQVTIPKDLAGSIIGKGGQRIKQIRHESGASIKIDEPLEGSEDRIITITGTQDQIQNAQYLLQNSVKQYSGKFF

SEQ ID NO: 180 - protein, 445 aa, Homo Sapiens
MAELKYISGFGNECSSEDPRCPGSLPEGQNNPQVCPYNLYAEQLSGSAFTCPRSTNKRSWLYRILPSVSHKPFESIDEGQVTHNWDEVDPDPNQLRWKPFEIPKASQKKVDFVSGLHTLCGAGDIKSNNGLAIHIFLCNTSMENRCFYNSDGDFLIVPQKGNLLIYTEFGKMLVQPNEICVIQRGMRFSIDVFEETRGYILEVYGVHFELPDLGPIGANGLANPRDFLIPIAWYEDRQVPGGYTVINKYQGKLFAAKQDVSPFNVVAWHGNYTPYKYNLKNFMVINSVAFDHADPSIFTVLTAKSVRPGVAIADFVIFPPRWGVADKTFRPPYYHRNCMSEFMGLIRGHYEAKQGGFLPGGGSLHSTMTPHGPDADCFEKASKVKLAPERIADGTMAFMFESSLSLAVTKWGLKASRCLDENYHKCWEPLKSHFTPNSRNPAEPN

SEQ ID NO: 181 - protein, 386 aa, Homo Sapiens
MGQREMWRLMSRFNAFKRTNTILHHLRMSKHTDAAEEVLLEKKGCTGVITLNRPKFLNALTLNMIRQIYPQLKKWEQDPETFLIIIKGAGGKAFCAGGDIRVISEAEKAKQKIAPVFFREEYMLNNAVGSCQKPYVALIHGITMGGGVGLSVHGQFRVATEKCLFAMPETAIGLFPDVGGGYFLPRLQGKLGYFLALTGFRLKGRDVYRAGIATHFVDSEKLAMLEEDLLALKSPSKENIASVLENYHTESKIDRDKSFILEEHMDKINSCFSANTVEEIIENLQQDGSSFALEQLKVINKMSPTSLKITLRQLMEGSSKTLQEVLTMEYRLSQACMRGHDFHEGVRAVLIDKDQSPKWKPADLKEVTEEDLNNHFKSLGSSDLKF

SEQ ID NO: 182 - protein, 254 aa, Homo Sapiens
MAKPCGVRLSGEARKQVEVFRQNLFQEAEEFLYRFLPQKIIYLNQLLQEDSLNVADLTSLRAPLDIPIPDPPPKDDEMETDKQEKKEGKRDKRKGLNPLFLTVHKCGFLPGNEKVLSLLALVKPEVWTLKEKCILVITWIQHLIPKIEDGNDFGVAIQEKVLERVNAVKTKVEAFQTTISKYFSERGDAVAKASKETHVMDYRALVHERDEAAYGELRAMVLDLRAFYAELYHIISSNLEKIVNPKGEEKPSMY

SEQ ID NO: 183 - protein, 501 aa, Homo Sapiens
MPSASASRKSQEKPREIMDAAEDYAKERYGISSMIQSQEKPDRVLVRVRDLTIQKADEVVWVRARVHTSRAKGKQCFLVLRQQQFNVQALVAVGDHASKQMVKFAANINKESIVDVEGVVRKVNQKIGSCTQQDVELHVQKIYVISLAEPRLPLQLDDAVRPEAEGEEEGRATVNQDTRLDNRVIDLRTSTSQAVFRLQSGICHLFRETLINKGFVEIQTPKIISAASEGGANVFTVSYFKNNAYLAQSPQLYKQMCICADFEKVFSIGPVFRAEDSNTHRHLTEFVGLDIEMAFNYHYHEVMEEIADTMVQIFKGLQERFQTEIQTVNKQFPCEPFKFLEPTLRLEYCEALAMLREAGVEMGDEDDLSTPNEKLLGHLVKEKYDTDFYILDKYPLAVRPFYTMPDPRNPKQSNSYDMFMRGEEILSGAQRIHDPQLLTERALHHGIDLEKIKAYIDSFRFGAPPHAGGGIGLERVTMLFLGLHNVRQTSMFPRDPKRLTP

SEQ ID NO: 184 - protein, 331 aa, Homo Sapiens
MSRQLSRARPATVLGAMEMGRRMDAPTSAAVTRAFLERGHTEIDTAFVYSEGQSETILGGLGLRLGGSDCRVKIDTKAIPLFGNSLKPDSLRFQLETSLKRLQCPRVDLFYLHMPDHSTPVEETLRACHQLHQEGKFVELGLSNYAAWEVAEICTLCKSNGWILPTVYQGMYNAITRQVETELFPCLRHFGLRFYAFNPLAGGLLTGKYKYEDKNGKQPVGRFFGNTWAEMYRNRYWKEHHFEGIALVEKALQAAYGASAPSMTSATLRWMYHHSQLQGAHGDAVILGMSSLEQLEQNLAAAEEGPLEPAVVDAFNQAWHLVTHECPNYFR

SEQ ID NO: 185 - protein, 412 aa, Homo Sapiens
MAAALLARASGPARRALCPRAWRQLHTIYQSVELPETHQMLLQTCRDFAEKELFPIAAQVDKEHLFPAAQVKKMGGLGLLAMDVPEELGGAGLDYLAYAIAMEEISRGCASTGVIMSVNNSLYLGPILKFGSKEQKQAWVTPFTSGDKIGCFALSEPGNGSDAGAASTTARAEGDSWVLNGTKAWITNAWEASAAVVFASTDRALQNKGISAFLVPMPTPGLTLGKKEDKLGIRGSSTANLIFEDCRIPKDSILGEPGMGFKIAMQTLDMGRIGIASQALGIAQTALDCAVNYAENRMAFGAPLTKLQVIQFKLADMALALESARLLTWRAAMLKDNKKPFIKEAAMAKLAASEAATAISHQAIQILGGMGYVTEMPAERHYRDARITEIYEGTSEIQRLVIAGHLLRSYRS

SEQ ID NO: 186 - protein, 329 aa, Homo Sapiens
MVRTKTWTLKKHFVGYPTNSDFELKTAELPPLKNGEVLLEALFLTVDPYMRVAAKRLKEGDTMMGQQVAKVVESKNVALPKGTIVLASPGWTTHSISDGKDLEKLLTEWPDTIPLSLALGTVGMPGLTAYFGLLEICGVKGGETVMVNAAAGAVGSVVGQIAKLKGCKVVGAVGSDEKVAYLQKLGFDVVFNYKTVESLEETLKKASPDGYDCYFDNVGGEFSNTVIGQMKKFGRIAICGAISTYNRTGPLPPGPPPEIVIYQELRMEAFVVYRWQGDARQKALKDLLKWVLEGKIQYKEYIIEGFENMPAAFMGMLKGDNLGKTIVKA

SEQ ID NO: 187 - protein, 535 aa, Homo Sapiens
MLLPLLLLLPMCWAVEVKRPRGVSLTNHHFYDESKPFTCLDGSATIPFDQVNDDYCDCKDGSDEPGTAACPNGSFHCTNTGYKPLYIPSNRVNDGVCDCCDGTDEYNSGVICENTCKEKGRKERESLQQMAEVTREGFRLKKILIEDWKKAREEKQKKLIELQAGKKSLEDQVEMLRTVKEEAEKPEREAKEQHQKLWEEQLAAAKAQQEQELAADAFKELDDDMDGTVSVTELQTHPELDTDGDGALSEAEAQALLSGDTQTDATSFYGRVWAAIRDKYRSEALPTDLPAPSAPDLTEPKEEQPPVPSSPTEEEEEEEEEEEEEAEEEEEEEDSEVQGEQPKEAPPPLSPPQPASPAEEDKMPPYDEQTQAFIDAAQEARNKFEEAERSLKDMEESIRNLEQEISFDFGPNGEFAYLYSQCYELTTNEYVYRLCPFKLVSQKPKLGGSPTSLGTWGSWIGPDHDKFSAMKYEQGTGCWQGPNRSTTVRLLCGKETMVTSTTEPSRCEYLMELMTPAACPEPPPEAPTEDDHDEL

SEQ ID NO: 188 - protein, 710 aa, Homo Sapiens
MVKLAKAGKNQGDPKKMAPPPKEVEEDSEDEEMSEDEEDDSSGEEVVIPQKKGKKAAATSAKKVVVSPTKKVAVATPAKKAAVTPGKKAAATPAKKTVTPAKAVTTPGKKGATPGKALVATPGKKGAAIPAKGAKNGKNAKKEDSDEEEDDDSEEDEEDDEDEDEDEDEIEPAAMKAAAAAPASEDEDDEDDEDDEDDDDDEEDDSEEEAMETTPAKGKKAAKVVPVKAKNVAEDEDEEEDDEDEDDDDDEDDEDDDDEDDEEEEEEEEEEPVKEAPGKRKKEMAKQKAAPEAKKQKVEGTEPTTAFNLFVGNLNFNKSAPELKTGISDVFAKNDLAVVDVRIGMTRKFGYVDFESAEDLEKALELTGLKVFGNEIKLEKPKGKDSKKERDARTLLAKNLPYKVTQDELKEVFEDAAEIRLVSKDGKSKGIAYIEFKTEADAEKTFEEKQGTEIDGRSISLYYTGEKGQNQDYRGGKNSTWSGESKTLVLSNLSYSATEETLQEVFEKATFIKVPQNQNGKSKGYAFIEFASFEDAKEALNSCNKREIEGRAIRLELQGPRGSPNARSQPSKTLFVKGLSEDTTEETLKESFDGSVRARIVTDRETGSSKGFGFVDFNSEEDAKAAKEAMEDGEIDGNKVTLDWAKPKGEGGFGGRGGGRGGFGGRGGGRGGRGGFGGRGRGGFGGRGGFRGGRGGGGDHKPQGKKTKFE

SEQ ID NO: 189 - protein, 427 aa, Homo Sapiens
MAVLAALLRSGARSRSPLLRRLVQEIRYVERSYVSKPTLKEVVIVSATRTPIGSFLGSLSLLPATKLGSIAIQGAIEKAGIPKEEVKEAYMGNVLQGGEGQAPTRQAVLGAGLPISTPCTTINKVCASGMKAIMMASQSLMCGHQDVMVAGGMESMSNVPYVMNRGSTPYGGVKLEDLIVKDGLTDVYNKIHMGSCAENTAKKLNIARNEQDAYAINSYTRSKAAWEAGKFGNEVIPVTVTVKGQPDVVVKEDEEYKRVDFSKVPKLKTVFQKENGTVTAANASTLNDGAAALVLMTADAAKRLNVTPLARIVAFADAAVEPIDFPIAPVYAASMVLKDVGLKKEDIAMWEVNEAFSLVVLANIKMLEIDPQKVNINGGAVSLGHPIGMSGARIVGHLTHALKQGEYGLASICNGGGGASAMLIQKL

SEQ ID NO: 190 - protein, 261 aa, Homo Sapiens
MTCWLRGVTATFGRPAEWPGYLSHLCGRSAAMDLGPMRKSYRGDREAFEETHLTSLDPVKQFAAWFEEAVQCPDIGEANAMCLATCTRDGKPSARMLLLKGFGKDGFRFFTNFESRKGKELDSNPFASLVFYWEPLNRQVRVEGPVKKLPEEEAECYFHSRPKSSQIGAVVSHQSSVIPDREYLRKKNEELEQLYQDQEVPKPKSWGGYVLYPQVMEFWQGQTNRLHDRIVFRRGLPTGDSPLGPMTHRGEEDWLYERLAP

SEQ ID NO: 191 - protein, 356 aa, Homo Sapiens
MDAGVTESGLNVTLTIRLLMHGKEVGSIIGKKGESVKRIREESGARINISEGNCPERIITLTGPTNAIFKAFAMIIDKLEEDINSSMTNSTAASRPPVTLRLVVPATQCGSLIGKGGCKIKEIRESTGAQVQVAGDMLPNSTERAITIAGVPQSVTECVKQICLVMLETLSQSPQGRVMTIPYQPMPASSPVICAGGQDRCSDAAGYPHATHDLEGPPLDAYSIQGQHTISPLDLAKLNQVARQQSHFAMMHGGTGFAGIDSSSPEVKGYWASLDASTQTTHELTIPNNLIGCIIGRQGANINEIRQMSGAQIKIANPVEGSSGRQVTITGSAASISLAQYLINARLSSEKGMGCS

SEQ ID NO: 192 - protein, 286 aa, Homo Sapiens
MERRLGVRAWVKENRGSFQPPVCNKLMHQEQLKVMFIGGPNTRKDYHIEEGEEVFYQLEGDMVLRVLEQGKHRDVVIRQGEIFLLPARVPHSPQRFANTVGLVVERRRLETELDGLRYYVGDTMDVLFEKWFYCKDLGTQLAPIIQEFFSSEQYRTGKPIPDQLLKEPPFPLSTRSIMEPMSLDAWLDSHHRELQAGTPLSLFGDTYETQVIAYGQGSSEGLRQNVDVWLWQLEGSSVVTMGGRRLSLAPDDSLLVLAGTSYAWERTQGSVALSVTQDPACKKPLG

SEQ ID NO: 193 - protein, 288 aa, Homo Sapiens
MKLPIFIADAFTARAFRGNPAAVCLLENELDEDMHQKIAREMNLSETAFIRKLHPTDNFAQSSCFGLRWFTPASEVPLCGHATLASAAVLFHKIKNMNSTLTFVTLSGELRARRAEDGIVLDLPLYPAHPQDFHEVEDLIKTAIGNTLVQDICYSPDTQKLLVRLSDVYNRSFLENLKVNTENLLQVENTGKVKGLILTLKGEPGGQTQAFDFYSRYFAPWVGVAEDPVTGSAHAVLSSYWSQHLGKKEMHAFQCSHRGGELGISLRPDGRVDIRGGAAVVLEGTLTA

SEQ ID NO: 194 - protein, 690 aa, Homo Sapiens
MGVRQQLALLLLLLLLLWGLGQPVWPVAVALTLRWLLGDPTCCVLLGLAMLARPWLGPWVPHGLSLAAAALALTLLPARLPPGLRWLPADVIFLAKILHLGLKIRGCLSRQPPDTFVDAFERRARAQPGRALLVWTGPGAGSVTFGELDARACQAAWALKAELGDPASLCAGEPTALLVLASQAVPALCMWLGLAKLGCPTAWINPHGRGMPLAHSVLSSGARVLVVDPDLRESLEEILPKLQAENIRCFYLSHTSPTPGVGALGAALDAAPSHPVPADLRAGITWRSPALFIYTSGTTGLPKPAILTHERVLQMSKMLSLSGATADDVVYTVLPLYHVMGLVVGILGCLDLGATCVLAPKFSTSCFWDDCRQHGVTVILYVGELLRYLCNIPQQPEDRTHTVRLAMGNGLRADVWETFQQRFGPIRIWEVYGSTEGNMGLVNYVGRCGALGKMSCLLRMLSPFELVQFDMEAAEPVRDNQGFCIPVGLGEPGLLLTKVVSQQPFVGYRGPRELSERKLVRNVRQSGDVYYNTGDVLAMDREGFLYFRDRLGDTFRWKGENVSTHEVEGVLSQVDFLQQVNVYGVCVPGCEGKVGMAAVQLAPGQTFDGEKLYQHVRAWLPAYATPHFIRIQDAMEVTSTFKLMKTRLVREGFNVGIVVDPLFVLDNRAQSFRPLTAEMYQAVCEGTWRL

SEQ ID NO: 195 - protein, 150 aa, Homo Sapiens
MSGSMATAEASGSDGKGQEVETSVTYYRLEEVAKRNSLKELWLVIHGRVYDVTRFLNEHPGGEEVLLEQAGVDASESFEDVGHSSDAREMLKQYYIGDIHPSDLKPESGSKDPSKNDTCKSCWAYWILPIIGAVLLGFLYRYYTSESKSS

SEQ ID NO: 196 - protein, 359 aa, Homo Sapiens
MPPTSSTPSLSRPGLGQAGKPDTGSHPPPTISTSIFLSCFPTIPLSRPRTTGPSHSYQSISHPRSCRDVPDDIQPITSLPGVARYGVKRLEEMLRPLVEEGLRCVLIFGVPSRVPKDERGSAADSEESPAIEAIHLLRKTFPNLLVACDVCLCPYTSHGHCGLLSENGAFRAEESRQRLAEVALAYAKAGCQVVAPSDMMDGRVEAIKEALMAHGLGNRVSVMSYSAKFASCFYGPFRDAAKSSPAFGDRRCYQLPPGARGLALRAVDRDVREGADMLMVKPGMPYLDIVREVKDKHPDLPLAVYHVSGEFAMLWHGAQAGAFDLKAAVLEAMTAFRRAGADIIITYYTPQLLQWLKEE

SEQ ID NO: 197 - protein, 276 aa, Homo Sapiens
MTSFRLALIQLQISSIKSDNVTRACSFIREAATQGAKIVSLPECFNSPYGAKYFPEYAEKIPGESTQKLSEVAKECSIYLIGGSIPEEDAGKLYNTCAVFGPDGTLLAKYRKIHLFDIDVPGKITFQESKTLSPGDSFSTFDTPYCRVGLGICYDMRFAELAQIYAQRGCQLLVYPGAFNLTTGPAHWELLQRSRAVDNQVYVATASPARDDKASYVAWGHSTVVNPWGEVLAKAGTEEAIVYSDIDLKKLAEIRQQIPVFRQKRSDLYAVEMKKP

SEQ ID NO: 198 - protein, 322 aa, Homo Sapiens
MSGELPPNINIKEPRWDQSTFIGRANHFFTVTDPRNILLTNEQLESARKIVHDYRQGIVPPGLTENELWRAKYIYDSAFHPDTGEKMILIGRMSAQVPMNMTITGCMMTFYRTTPAVLFWQWINQSFNAVVNYTNRSGDAPLTVNELGTAYVSATTGAVATALGLNALTKHVSPLIGRFVPFAAVAAANCINIPLMRQRELKVGIPVTDENGNRLGESANAAKQAITQVVVSRILMAAPGMAIPPFIMNTLEKKAFLKRFPWMSAPIQVGLVGFCLVFATPLCCALFPQKSSMSVTSLEAELQAKIQESHPELRRVYFNKGL

SEQ ID NO: 199 - protein, 281 aa, Homo Sapiens
MATNFLAHEKIWFDKFKYDDAERRFYEQMNGPVAGASRQENGASVILRDIARARENIQKSLAGSSGPGASSGTSGDHGELVVRIASLEVENQSLRGVVQELQQAISKLEARLNVLEKSSPGHRATAPQTQHVSPMRQVEPPAKKPATPAEDDEDDDIDLFGSDNEEEDKEAAQLREERLRQYAEKKAKKPALVAKSSILLDVKPWDDETDMAQLEACVRSIQLDGLVWGASKLVPVGYGIRKLQIQCVVEDDKVGTDLLEEEITKFEEHVQSVDIAAFNKI

SEQ ID NO: 200 - protein, 317 aa, Homo Sapiens [sequence omitted]

SEQ ID NO: 201 - protein, 586 aa, Homo Sapiens
MATATPVPPRMGSRAGGPTTPLSPTRLSRLQEKEELRELNDRLAVYIDKVRSLETENSALQLQVTEREEVRGRELTGLKALYETELADARRALDDTARERAKLQIELGKCKAEHDQLLLNYAKKESDLNGAQIKLREYEAALNSKDAALATALGDKKSLEGDLEDLKDQIAQLEASLAAAKKQLADETLLKVDLENRCQSLTEDLEFRKSMYEEEINETRRKHETRLVEVDSGRQIEYEYKLAQALHEMREQHDAQVRLYKEELEQTYHAKLENARLSSEMNTSTVNSAREELMESRMRIESLSSQLSNLQKESRACLERIQELEDLLAKEKDNSRRMLTDKEREMAEIRDQMQQQLNDYEQLLDVKLALDMEISAYRKLLEGEEERLKLSPSPSSRVTVSRASSSRSVRTTRGKRKRVDVEESEASSSVSISHSASATGNVCIEEIDVDGKFIRLKNTSEQDQPMGGWEMIRKIGDTSVSYKYTSRYVLKAGQTVTIWAANAGVTASPPTDLIWKNQNSWGTGEDVKVILKNSQGEEVAQRSTVFKTTIPEEEEEEEEAAGVVVEEELFHQQGTPRASNRSCAIM

SEQ ID NO: 202 - protein, 293 aa, Homo Sapiens
MASNVTNKTDPRSMNSRVFIGNLNTLVVKKSDVEAIFSKYGKIVGCSVHKGFAFVQYVNERNARAAVAGEDGRMIAGQVLDINLAAEPKVNRGKAGVKRSAAEMYGSSFDLDYDFQRDYYDRMYSYPARVPPPPPIARAVVPSKRQRVSGNTSRRGKSGFNSKSGQRGSSKSGKLKGDDLQAIKKELTQIKQKVDSLLENLEKIEKEQSKQAVEMKNDKSEEEQSSSSVKKDETNVKMESEGGADDSAEEGDLLDDDDNEDRGDDQLELIKDDEKEAEEGEDDRDSANGEDDS

SEQ ID NO: 203 - protein, 261 aa, Homo Sapiens
MASPDWGYDDKNGPEQWSKLYPIANGNNQSPVDIKTSETKHDTSLKPISVSYNPATAKEIINVGHSFHVNFEDNDNRSVLKGGPFSDSYRLFQFHFHWGSTNEHGSEHTVDGVKYSAELHVAHWNSAKYSSLAEAASKADGLAVIGVLMKVGEANPKLQKVLDALQAIKTKGKRAPFTNFDPSTLLPSSLDFWTYPGSLTHPPLYESVTWIICKESISVSSEQLAQFRSLLSNVEGDNAVPMQHNNRPTQPLKGRTVRASF

SEQ ID NO: 204 - protein, 254 aa, Homo Sapiens
MAAYKLVLIRHGESAWNLENRFSGWYDADLSPAGHEEAKRGGQALRDAGYEFDICFTSVQKRAIRTLWTVLDAIDQMWLPVVRTWRLNERHYGGLTGLNKAETAAKHGEAQVKIWRRSYDVPPPPMEPDHPFYSNISKDRRYADLTEDQLPSCESLKDTIARALPFWNEEIVPQIKEGKRVLIAAHGNSLRGIVKHLEGLSEEAIMELNLPTGIPIVYELDKNLKPIKPMQFLGDEETVRKAMEAVAAQGKAKK

SEQ ID NO: 205 - protein, 450 aa, Homo Sapiens
MVPLVAVVSGPRAQLFACLLRLGTQQVGPLQLHTGASHAARNHYEVLVLGGGSGGITMAARMKRKVGAENVAIVEPSERHFYQPIWTLVGAGAKQLSSSGRPTASVIPSGVEWIKARVTELNPDKNCIHTDDDEKISYRYLIIALGIQLDYEKIKGLPEGFAHPKIGSNYSVKTVEKTWKALQDFKEGNAIFTFPNTPVKCAGAPQKIMYLSEAYFRKTGKRSKANIIFNTSLGAIFGVKKYADALQEIIQERNLTVNYKKNLIEVRADKQEAVFENLDKPGETQVISYEMLHVTPPMSPPDVLKTSPVADAAGWVDVDKETLQHRRYPNVFGIGDCTNLPTSKTAAAVAAQSGILDRTISVIMKNQTPTKKYDGYTSCPLVTGYNRVILAEFDYKAEPLETFPFDQSKERLSMYLMKADLMPFLYWNMMLRGYWGGPAFLRKLFHLGMS

SEQ ID NO: 206 - protein, 286 aa, Homo Sapiens
MSEEQFGGTGRRHANGGGRRSAGDEEGAMVAATQGAAAAREADAGPGAEPRLEAPKGSAESEGAKIDASKNEEDEGKMFIGGLSWDTTKKDLKDYFSKFGEVVDCTLKLDPITGRSRGFGFVLFKESESVDKVMDQKEHKLNGKVIDPKRAKAMKTKEPVKKIFVGGLSPDTPEEKIREYFGGFGEVESIELPMDNKTNKRRGFCFITFKEEEPVKKIMEKKYHNVGLSKCEIKVAMSKEQYQQQQQWGSRGGFAGRARGEFRNSSEAGEGLELPPNSIHCWQLSV

SEQ ID NO: 207 - protein, 300 aa, Homo Sapiens
MSGALDVLQMKEEDVLKFLAAGTHLGGTNLDFQMEQYIYKRKSDGIYIINLKRTWEKLLLAARAIVAIENPADVSVISSRNTGQVCGTVRAVLKFAAATGATPIAGRFTPGTFTNQIQAAFREPRLLVVTDPRADHQPLTEASYVNLPTIALCNTDSPLRYVDIAIPCNNKGAHSVGLMWWMLAREVLRMRGTISREHPWEVMPDLYFYRDPEEIEKEEQAAAEKAVTKEEFQGEWTAPAPEFTATQPEVADWSEGVQVPSVPIQQFPTEDWSAQPATEDWSAAPTAQATEWVGATTDWS

SEQ ID NO: 208 - protein, 97 aa, Homo Sapiens
MGVQVETISPGDGRTFPKRGQTCVVHYTDECGSESQTDYISRLCLWCHWAPRHHPTTCHSRLRCGASKTGMTGMASSLSSLFLDLPWRDLVPPDMCT

SEQ ID NO: 209 - protein, 140 aa, Homo Sapiens
MAGWNAYIDNLMADGTCQDAAIVGYKDSPSVWAAVPGKTFVNITPAEVGVLVGKDRSSFYVNGLTLGGQKCSVIRDSLLQDGEFSMDLRTKSTGGAPTFNVTVTKTDKTLVLLMGKEGVHGGLINKKCYEMASHLRRSQY

SEQ ID NO: 210 - protein, 415 aa, Homo Sapiens
MGRRLGAGTRRGFGAGCRLSPQRPGTPAVHAFGPPWLTHRPRRRTMDAPRQVVNFGPGPAKLPHSVLLEIQKELLDYKGVGISVLEMSHRSSDFAKIINNTENLVRELLAVPDNYKVIFLQGGGCGQFSAVPLNLIGLKAGRCADYVVTGAWSAKAAEEAKKFGTINIVHPKLGSYTKIPDPSTWNLNPDASYVYYCANETVHGVEFDFIPDVKGAVLVCDMSSNFLSKPVDVSKFGVIFAGAQKNVGSAGVTVVIVRDDLLGFALRECPSVLEYKVQAGNSSLYNTPPCFSIYVMGLVLEWIKNNGGAAAMEKLSSIKSQTIYEIIDNSQGFYVCPVEPQNRSKMNIPFRIGNAKGDDALEKRFLDKALELNMLSLKGHRSVGGIRASLYNAVTIEDVQKLAAFMKKFLEMHQL

SEQ ID NO: 211 - protein, 319 aa, Homo Sapiens
MASSAAGCVVIVGSGVIGRSWAMLFASGGFQVKLYDIEQQQIRNALENIRKEMKLLEQAGSLKGSLSVEEQLSLISGCPNIQEAVEGAMHIQECVPEDLELKKKIFAQLDSIIDDRVILSSSTSCLMPSKLFAGLVHVKQCIVAHPVNPPYYIPLVELVPHPETAPTTVDRTHALMKKIGQCPMRVQKEVAGFVLNRLQYAIISEAWRLVEEGIVSPSDLDLVMSEGLGMRYAFIGPLETMHLNAEGMLSYCDRYSEGIKHVLQTFGPIPEFSRATAEKVNQDMCMKVPDDPEHLAARRQWRDECLMRLAKLKSQVQPQ

SEQ ID NO: 212 - protein, 750 aa, Homo Sapiens
MLRAKNQLFLLSPHYLRQVKESSGSRLIQQRLLHQQQPLHPEWAALAKKQLKGKNPEDLIWHTPEGISIKPLYSKRDTMDLPEELPGVKPFTRGPYPTMYTFRPWTIRQYAGFSTVEESNKFYKDNIKAGQQGLSVAFDLATHRGYDSDNPRVRGDVGMAGVAIDTVEDTKILFDGIPLEKMSVSMTMNGAVIPVLANFIVTGEEQGVPKEKLTGTIQNDILKEFMVRNTYIFPPEPSMKIIADIFEYTAKHMPKFNSISISGYHMQEAGADAILELAYTLADGLEYSRTGLQAGLTIDEFAPRLSFFWGIGMNFYMEIAKMRAGRRLWAHLIEKMFQPKNSKSLLLRAHCQTSGWSLTEQDPYNNIVRTAIEAMAAVFGGTQSLHTNSFDEALGLPTVKSARIARNTQIIIQEESGIPKVADPWGGSYMMECLTNDVYDAALKLINEIEEMGGMAKAVAEGIPKLRIEECAARRQARIDSGSEVIVGVNKYQLEKEDAVEVLAIDNTSVRNRQIEKLKKIKSSRDQALAERCLAALTECAASGDGNILALAVDASRARCTVGEITDALKKVFGEHKANDRMVSGAYRQEFGESKEITSAIKRVHKFMEREGRRPRLLVAKMGQDGHDRGAKVIATGFADLGFDVDIGPLFQTPREVAQQAVDADVHAVGISTLAAGHKTLVPELIKELNSLGRPDILVMCGGVIPPQDYEFLFEVGVSNVFGPGTRIPKAAVQVLDDIEKCLEKKQQSV

SEQ ID NO: 213 - protein, 475 aa, Homo Sapiens
MAALTTLFKYIDENQDRYIKKLAKWVAIQSVSAWPEKRGEIRRMMEVAAADVKQLGGSVELVDIGKQKLPDGSEIPLPPILLGRLGSDPQKKTVCIYGHLDVQPAALEDGWDSEPFTLVERDGKLYGRGSTDDKGPVAGWINALEAYQKTGQEIPVNVRFCLEGMEESGSEGLDELIFARKDTFFKDVDYVCISDNYWLGKKKPCITYGLRGICYFFIEVECSNKDLHSGVYGGSVHEAMTDLILLMGSLVDKRGNILIPGINEAVAAVTEEEHKLYDDIDFDIEEFAKDVGAQILLHSHKKDILMHRWRYPSLSLHGIEGAFSGSGAKTVIPRKVVGKFSIRLVPNMTPEVVGEQVTSYLTKKFAELRSPNEFKVYMGHGGKPWVSDFSHPHYLAGRRAMKTVFGVEPDLTREGGSIPVTLTFQEATGKNVMLLPVGSADDGAHSQNEKLNRYNYIEGTKMLAAYLYEVSQLKD

SEQ ID NO: 214 - protein, 225 aa, Homo Sapiens
MGFGDLKSPAGLQVLNDYLADKSYIEGYVPSQADVAVFEAVSSPPPADLCHALRWYNHIKSYEKEKASLPGVKKALGKYGPADVEDTTGSGATDSKDDDDIDLFGSDDEEESEEAKRLREERLAQYESKKAKKPALVAKSSILLDVKPWDDETDMAKLEECVRSIQADGLVWGSSKLVPVGYGIKKLQIQCVVEDDKVGTDMLEEQITAFEDYVQSMDVAAFNKI

SEQ ID NO: 215 - protein, 178 aa, Homo Sapiens [sequence omitted]

SEQ ID NO: 216 - protein, 199 aa, Homo Sapiens
MANRGPAYGLSREVQQKIEKQYDADLEQILIQWITTQCRKDVGRPQPGRENFQNWLKDGTVLCELINALYPEGQAPVKKIQASTMAFKQMEQISQFLQAAERYGINTTDIFQTVDLWEGKNMACVQRTLMNLGGLAVARDDGLFSGDPNWFPKKSKENPRNFSDNQLQEGKNVIGLQMGTNRGASQAGMTGYGMPRQIL

SEQ ID NO: 217 - protein, 513 aa, Homo Sapiens [sequence omitted]

SEQ ID NO: 218 - protein, 730 aa, Homo Sapiens
MAAGVEAAAEVAATEIKMEEESGAPGVPSGNGAPGPKGEGERPAQNEKRKEKNIKRGGNRFEPYANPTKRYRAFITNIPFDVKWQSLKDLVKEKVGEVTYVELLMDAEGKSRGCAVVEFKMEESMKKAAEVLNKHSLSGRPLKVKEDPDGEHARRAMQKVMATTGGMGMGPGGPGMITIPPSILNNPNIPNEIIHALQAGRLGSTVFVANLDYKVGWKKLKEVFSMAGVVVRADILEDKDGKSRGIGTVTFEQSIEAVQAISMFNGQLLFDRPMHVKMDERALPKGDFFPPERPQQLPHGLGGIGMGLGPGGQPIDANHLNKGIGMGNIGPAGMGMEGIGFGINKMGGMEGPFGGGMENMGRFGSGMNMGRINEILSNALKRGEIIAKQGGGGGGGSVPGIERMGPGIDRLGGAGMERMGAGLGHGMDRVGSEIERMGLVMDRMGSVERMGSGIERMGPLGLDHMASSIERMGQTMERIGSGVERMGAGMGFGLERMAAPIDRVGQTIERMGSGVERMGPAIERMGLSMERMVPAGMGAGLERMGPVMDRMATGLERMGANNLERMGLERMGANSLERMGLERMGANSLERMGPAMGPALGAGIERMGLAMGGGGGASFDRAIEMERGNFGGSFAGSFGGAGGHAPGVARKACQIFVRNLPFDFTWKMLKDKFNECGHVLYADIKMENGKSKGCGVVKFESPEVAERACRMMNGMKLSGREIDVRIDRNA

SEQ ID NO: 219 - protein, 199 aa, Homo Sapiens
MDGQKKNWKDKVVDLLYWRDIKKTGVVFGASLFLLLSLTVFSIVSVTAYIALALLSVTISFRIYKGVIQAIQKSDEGHPFRAYLESEVAISEELVQKYSNSALGHVNCTIKELRRLFLVDDLVDSLKFAVLMWVFTYVGALFNGLTLLILALISLFSVPVIYERHQAQIDHYLGLANKNVKDAMAKIQAKIPGLKRKAE

SEQ ID NO: 220 - protein, 127 aa, Homo Sapiens
MPKSKELVSSSSSGSDSDSEVDKKLKRKKQVAPEKPVKKQKTGETSRALSSSKQSSSSRDDNMFQIGKMRYVSVRDFKGKVLIDIREYWMDPEGEMKPGRKGISLNPEQWSQLKEQISDIDDAVRKL

SEQ ID NO: 221 - protein, 128 aa, Homo Sapiens [sequence omitted]

SEQ ID NO: 222 - protein, 1744 aa, Homo Sapiens
MRLLWGLIWASSFFTLSLQKPRLLLFSPSVVHLGVPLSVGVQLQDVPRGQVVKGSVFLRNPSRNNVPCSPKVDFTLSSERDFALLSLQVPLKDAKSCGLHQLLRGPEVQLVAHSPWLKDSLSRTTNIQGINLLFSSRRGHLFLQTDQPIYNPGQRVRYRVFALDQKMRPSTDTITVMVENSHGLRVRKKEVYMPSSIFQDDFVIPDISEPGTWKISARFSDGLESNSSTQFEVKKYVLPNFEVKITPGKPYILTVPGHLDEMQLDIQARYIYGKPVQGVAYVRFGLLDEDGKKTFFRGLESQTKLVNGQSHISLSKAEFQDALEKLNMGITDLQGLRLYVAAAIIESPGGEMEEAELTSWYFVSSPFSLDLSKTKRHLVPGAPFLLQALVREMSGSPASGIPVKVSATVSSPGSVPEVQDIQQNTDGSGQVSIPIIIPQTISELQLSVSAGSPHPAIARLTVAAPPSGGPGFLSIERPDSRPPRVGDTLNLNLRAVGSGATFSHYYYMILSRGQIVFMNREPKRTLTSVSVFVDHHLAPSFYFVAFYYHGDHPVANSLRVDVQAGACEGKLELSVDGAKQYRNGESVKLHLETDSLALVALGALDTALYAAGSKSHKPLNMGKVFEAMNSYDLGCGPGGGDSALQVFQAAGLAFSDGDQWTLSRKRLSCPKEKTTRKKRNVNFQKAINEKLGQYASPTAKRCCQDGVTRLPMMRSCEQRAARVQQPDCREPFLSCCQFAESLRKKSRDKGQAGLQRALEILQEEDLIDEDDIPVRSFFPENWLWRVETVDRFQILTLWLPDSLTTWEIHGLSLSKTKGLCVATPVQLRVFREFHLHLRLPMSVRRFEQLELRPVLYNYLDKNLTVSVHVSPVEGLCLAGGGGLAQQVLVPAGSARPVAFSVVPTAAAAVSLKVVARGSFEFPVGDAVSKVLQIEKEGAIHREELVYELNPLDHRGRTLEIPGNSDPNMIPDGDFNSYVRVTASDPLDTLGSEGALSPGGVASLLRLPRGCGEQTMIYLAPTLAASRYLDKTEQWSTLPPETKDHAVDLIQKGYMRIQQFRKADGSYAAWLSRDSSTWLTAFVLKVLSLAQEQVGGSPEKLQETSNWLLSQQQADGSFQDPCPVLDRSMQGGLVGNDETVALTAFVTIALHHGLAVFQDEGAEPLKQRVEASISKANSFLGEKASAGLLGAHAAAITAYALSLTKAPVDLLGVAHNNLMAMAQETGDNLYWGSVTGSQSNAVSPTPAPRNPSDPMPQAPALWIETTAYALLHLLLHEGKAEMADQASAWLTRQGSFQGGFRSTQDTVIALDALSAYWIASHTTEERGLNVTLSSTGRNGFKSHALQLNNRQIRGLEEELQFSLGSKINVKVGGNSKGTLKVLRTYNVLDMKNTTCQDLQIEVTVKGHVEYTMEANEDYEDYEYDELPAKDDPDAPLQPVTPLQLFEGRRNRRRREAPKVVEEQESRVHYTVCIWRNGKVGLSGMAIADVTLLSGFHALRADLEKLTSLSDRYVSHFETEGPHVLLYFDSVPTSRECVGFEAVQEVPVGLVQPASATLYDYYNPERRCSVFYGAPSKSRLLATLCSAEVCQCAEGKCPRQRRALERGLQDEDGYRMKFACYYPRVEYGFQVKVLREDSRAAFRLFETKITQVLHFTKDVKAAANQMRNFLVRASCRLRLEPGKEYLIMGLDGATYDLEGHPQYLLDSNSWIEEMPSERLCRSTRQRAACAQLNDFLQEYGTQGCQV

SEQ ID NO: 223 - protein, 503 aa, Homo Sapiens
MALIPDLAMETWLLLAVSLVLLYLYGTHSHGLFKKLGIPGPTPLPFLGNILSYHKGFCMFDMECHKKYGKVWGFYDGQQPVLAITDPDMIKTVLVKECYSVFTNRRPFGPVGFMKSAISIAEDEEWKRLRSLLSPTFTSGKLKEMVPIIAQYGDVLVRNLRREAETGKPVTLKDVFGAYSMDVITSTSFGVNIDSLNNPQDPFVENTKKLLRFDFLDPFFLSITVFPFLIPILEVLNICVFPREVTNFLRKSVKRMKESRLEDTQKHRVDFLQLMIDSQNSKETESHKALSDLELVAQSIIFIFAGYETTSSVLSFIMYELATHPDVQQKLQEEIDAVLPNKAPPTYDTVLQMEYLDMVVNETLRLFPIAMRLERVCKKDVEINGMFIPKGVVVMIPSYALHRDPKYWTEPEKFLPERFSKKNKDNIDPYIYTPFGSGPRNCIGMRFALMNMKLALIRVLQNFSFKPCKETQIPLKLSLGGLLQPEKPVVLKVESRDGTVSGA

SEQ ID NO: 224 - protein, 496 aa, Homo Sapiens
MASSTGDRSQAVRHGLRAKVLTLDGMNPRVRRVEYAVRGPIVQRALELEQELRQGVKKPFTEVIRANIGDAQAMGQRPITFLRQVLALCVNPDLLSSPNFPDDAKKRAERILQACGGHSLGAYSVSSGIQLIREDVARYIERRDGGIPADPNNVFLSTGASDAIVTVLKLLVAGEGHTRTGVLIPIPQYPLYSATLAELGAVQVDYYLDEERAWALDVAELHRALGQARDHCRPRALCVINPGNPTGQVQTRECIEAVIRFAFEERLFLLADEVYQDNVYAAGSQFHSFKKVLMEMGPPYAGQQELASFHSTSKGYMGECGFRGGYVEVVNMDAAVQQQMLKLMSVRLCPPVPGQALLDLVVSPPAPTDPSFAQFQAEKQAVLAELAAKAKLTEQVFNEAPGISCNPVQGAMYSFPRVQLPPRAVERAQELGLAPDMFFCLRLLEETGICVVPGSGFGQREGTYHFRMTILPPLEKLRLLLEKLSRFHAKFTLEYS

SEQ ID NO: 225 - protein, 235 aa, Homo Sapiens
MAVELGVLLVRPRPGTGLGRVMRTLLLVLWLATRGSALYFHIGETEKKCFIEEIPDETMVIGNYRTQLYDKQREEYQPATPGLGMFVEVKDPEDKVILARQYGSEGRFTFTSHTPGEHQICLHSNSTKFSLFAGGMLRVHLDIQVGEHANDYAEIAAKDKLSELQLRVRQLVEQVEQIQKEQNYQRWREERFRQTSESTNQRVLWWSILQTLILVAIGVWQMRHLKSFFEAKKLV

SEQ ID NO: 226 - protein, 210 aa, Homo Sapiens
MAASVEQREGTIQVQGQALFFREALPGSGQARFSVLLLHGIRFSSETWQNLGTLHRLAQAGYRAVAIDLPGLGHSKEAAAPAPIGELAPGSFLAAVVDALELGPPVVISPSLSGMYSLPFLTAPGSQLPGFVPVAPICTDKINAANYASVKTPALIVYGDQDPMGQTSFEHLKQLPNHRVLIMKGAGHPCYLDKPEEWHTGLLDFLQGLQ

SEQ ID NO: 227 - protein, 283 aa, Homo Sapiens
MCIPPSYADLGKAARDIFNKGFGFGLVKLDVKTKSCSGVEFSTSGSSNTDTGKVTGTLETKYKWCEYGLTFTEKWNTDNTLGTEIAIEDQICQGLKLTFDTTFSPNTGKKSGKIKSSYKRECINLGCDVDFDFAGPAIHGSAVFGYEGWLAGYQMTFDSAKSKLTRNNFAVGYRTGDFQLHTNVNDGTEFGGSIYQKVCEDLDTSVNLAWTSGTNCTRFGIAAKYQLDPTASISAKVNNSSLIGVGYTQTLRPGVKLTLSALVDGKSINAGGHKVGLALELEA

SEQ ID NO: 228 - protein, 234 aa, Homo Sapiens [sequence omitted]

SEQ ID NO: 229 - protein, 289 aa, Homo Sapiens
MSGFSTEERAAPFSLEYRVFLKNEKGQYISPFHDIPIYADKDVFHMVVEVPRWSNAKMEIATKDPLNPIKQDVKKGKLRYVANLFPYKGYIWNYGAIPQTWEDPGHNDKHTGCCGDNDPIDVCEIGSKVCARGEIIGVKVLGILAMIDEGETDWKVIAINVDDPDAANYNDINDVKRLKPGYLEATVDWFRRYKVPDGKPENEFAFNAEFKDKDFAIDIIKSTHDHWKALVTKKTNGKGISCMNTTLSESPFKCDPDAARAIVDALPPPCESACTVPTDVDKWFHHQKN

SEQ ID NO: 230 - protein, 405 aa, Homo Sapiens
MQEKDASSQGFLPHFQHFATQAIHVGQDPEQWTSRAVVPPISLSTTFKQGAPGQHSGFEYSRSGNPTRNCLEKAVAALDGAKYCLAFASGLAATVTITHLLKAGDQIICMDDVYGGTNRYFRQVASEFGLKISFVDCSKIKLLEAAITPETKLVWIETPTNPTQKVIDIEGCAHIVHKHGDIILVVDNTFMSPYFQRPLALGADISMYSATKYMNGHSDVVMGLVSVNCESLHNRLRFLQNSLGAVPSPIDCYLCNRGLKTLHVRMEKHFKNGMAVAQFLESNPWVEKVIYPGLPSHPQHELVKRQCTGCTGMVTFYIKGTLQHAEIFLKNLKLFTLAESLGGFESLAELPAIMTHASVLKNDRDVLGISDTLIRLSVGLEDEEDLLEDLDQALKAAHPPSGSHS

SEQ ID NO: 231 - protein, 181 aa, Homo Sapiens
MGNIFANLFKGLFGKKEMRILMVGLDAAGKTTILYKLKLGEIVTTIPTIGFNVETVEYKNISFTVWDVGGQDKIRPLWRHYFQNTQGLIFVVDSNDRERVNEAREELMRMLAEDELRDAVLLVFANKQDLPNAMNAAEITDKLGLHSLRHRNWYIQATCATSGDGLYEGLDWLSNQLRNQK

SEQ ID NO: 232 - protein, 510 aa, Homo Sapiens
MAGSRQRGLRARVRPLFCALLLSLGRFVRGDGVGGDPAVALPHRRFEYKYSFKGPHLVQSDGTVPFWAHAGNAIPSSDQIRVAPSLKSQRGSVWTKTKAAFENWEVEVTFRVTGRGRIGADGLAIWYAENQGLEGPVFGSADLWNGVGIFFDSFDNDGKKNNPAIVIIGNNGQIHYDHQNDGASQALASCQRDFRNKPYPVRAKITYYQNTLTVMINNGFTPDKNDYEFCAKVENMIIPAQGHFGISAATGGLADDHDVLSFLTFQLTEPGKEPPTPDKEISEKEKEKYQEEFEHFQQELDKKKEEFQKGHPDLQGQPAEEIFESVGDRELRQVFEGQNRIHLEIKQLNRQLDMILDEQRRYVSSLTEEISKRGAGMPGQHGQITQQELDTVVKTQHEILRQVNEMKNSMSETVRLVSGMQHPGSAGGVYETTQHFIDIKEHLHIVKRDIDNLVQRNMPSNEKPKCPELPPFPSCLSTVHFIIFVVVQTVLFIGYIMYRSQQEAAAKKFF

SEQ ID NO: 233 - protein, 516 aa, Homo Sapiens
MALSQSVPFSATELLLASAIFCLVFWVLKGLRPRVPKGLKSPPEPWGWPLLGHVLTLGKNPHLALSRMSQRYGDVLQIRIGSTPVLVLSRLDTIRQALVRQGDDFKGRPDLYTSTLITDGQSLTFSTDSGPVWAARRRLAQNALNTFSIASDPASSSSCYLEEHVSKEAKALISRLQELMAGPGHFDPYNQVVVSVANVIGAMCFGQHFPESSDEMLSLVKNTHEFVETASSGNPLDFFPILRYLPNPALQRFKAFNQRFLWFLQKTVQEHYQDFDKNSVRDITGALFKHSKKGPRASGNLIPQEKIVNLVNDIFGAGFDTVTTAISWSLMYLVTKPEIQRKIQKELDTVIGRERRPRLSDRPQLPYLEAFILETFRHSSFLPFTIPHSTTRDTTLNGFYIPKKCCVFVNQWQVNHDPELWEDPSEFRPERFLTADGTAINKPLSEKMMLFGMGKRRCIGEVLAKWEIFLFLAILLQQLEFSVPPGVKVDLTPIYGLTMKHARCEHVQARLRFSIN

SEQ ID NO: 234 - protein, 1023 aa, Homo Sapiens
MGKGVGRDKYEPAAVSEQGDKKGKKGKKDRDMDELKKEVSMDDHKLSLDELHRKYGTDLSRGLTSARAAEILARDGPNALTPPPTTPEWIKFCRQLFGGFSMLLWIGAILCFLAYSIQAATEEEPQNDNLYLGVVLSAVVIITGCFSYYQEAKSSKIMESFKNMVPQQALVIRNGEKMSINAEEVVVGDLVEVKGGDRIPADLRIISANGCKVDNSSLTGESEPQTRSPDFTNENPLETRNIAFFSTNCVEGTARGIVVYTGDRTVMGRIATLASGLEGGQTPIAAEIEHFIHIITGVAVFLGVSFFILSLILEYTWLEAVIFLIGIIVANVPEGLLATVTVCLTLTAKRMARKNCLVKNLEAVETLGSTSTICSDKTGTLTQNRMTVAHMWFDNQIHEADTTENQSGVSFDKTSATWLALSRIAGLCNRAVFQANQENLPILKRAVAGDASESALLKCIELCCGSVKEMRERYAKIVEIPFNSTNKYQLSIHKNPNTSEPQHLLVMKGAPERILDRCSSILLHGKEQPLDEELKDAFQNAYLELGGLGERVLGFCHLFLPDEQFPEGFQFDTDDVNFPIDNLCFVGLISMIDPPRAAVPDAVGKCRSAGIKVIMVTGDHPITAKAIAKGVGIISEGNETVEDIAARLNIPVSQVNPRDAKACVVHGSDLKDMTSEQLDDILKYHTEIVFARTSPQQKLIIVEGCQRQGAIVAVTGDGVNDSPALKKADIGVAMGIAGSDVSKQAADMILLDDNFASIVTGVEEGRLIFDNLKKSIAYTLTSNIPEITPFLIFIIANIPLPLGTVTILCIDLGTDMVPAISLAYEQAESDIMKRQPRNPKTDKLVNERLISMAYGQIGMIQALGGFFTYFVILAENGFLPIHLLGLRVDWDDRWINDVEDSYGQQWTYEQRKIVEFTCHTAFFVSIVVVQWADLVICKTRRNSVFQQGMKNKILIFGLFEETALAAFLSYCPGMGVALRMYPLKPTWWFCAFPYSLLIFVYDEVRKLIIRRRPGGWVEKETYY

SEQ ID NO: 235 - protein, 1058 aa, Homo Sapiens
MSSSPLSKKRRVSGPDPKPGSNCSPAQSVLSEVPSVPTNGMAKNGSEADIDEGLYSRQLYVLGHEAMKRLQTSSVLVSGLRGLGVEIAKNIILGGVKAVTLHDQGTAQWADLSSQFYLREEDIGKNRAEVSQPRLAELNSYVPVTAYTGPLVEDFLSGFQVVVLTNTPLEDQLRVGEFCHNRGIKLVVADTRGLFGQLFCDFGEEMILTDSNGEQPLSAMVSMVTKDNPGVVTCLDEARHGFESGDFVSFSEVQGMVELNGNQPMEIKVLGPYTFSICDTSNFSDYIRGGIVSQVKVPKKISFKSLVASLAEPDFVVTDFAKFSRPAQLHIGFQALHQFCAQHGRPPRPRNEEDAAELVALAQAVNARALPAVQQNNLDEDLIRKLAYVAAGDLAPINAFIGGLAAQEVMKACSGKFMPIMQWLYFDALECLPEDKEVLTEDKCLQRQNRYDGQVAVFGSDLQEKLGKQKYFLVGAGAIGCELLKNFAMIGLGCGEGGEIIVTDMDTIEKSNLNRQFLFRPWDVTKLKSDTAAAAVRQMNPHIRVTSHQNRVGPDTERIYDDDFFQNLDGVANALDNVDARMYMDRRCVYYRKPLLESGTLGTKGNVQVVIPFLTESYSSSQDPPEKSIPICTLKNFPNAIEHTLQWARDEFEGLFKQPAENVNQYLTDPKFVERTLRLAGTQPLEVLEAVQRSLVLQRPQTWADCVTWACHHWHTQYSNNIRQLLHNFPPDQLTSSGAPFWSGPKRCPHPLTFDVNNPLHLDYVMAAANLFAQTYGLTGSQDRAAVATFLQSVQVPEFTPKSGVKIHVSDQELQSANASVDDSRLEELKATLPSPDKLPGFKMYPIDFEKDDDSNFHMDFIVAASNLRAENYDIPSADRHKSKLIAGKIIPAIATTTAAVVGLVCLELYKVVQGHRQLDSYKNGFLNLALPFFGFSEPLAAPRHQYYNQEWTLWDRFEVQGLQPNGEEMTLKQFLDYFKTEHKLEITMLSQGVSMLYSFFMPAAKLKERLDQPMTEIVSRVSKRKLGRHVRALVLELCCNDESGEDVEVPYVRYTIR

SEQ ID NO: 236 - protein, 280 aa, Homo Sapiens
MAAVVALSLRRRLPATTLGGACLQASRGAQTAAATAPRIKKFAIYRWDPDKAGDKPHMQTYEVDLNKCGPMVLDALIKIKNEVDSTLTFRRSCREGICGSCAMNINGGNTLACTRRIDTNLNKVSKIYPLPHMYVIKDLVPDLSNFYAQYKSIEPYLKKKDESQEGKQQYLQSIEEREKLDGLYECILCACCSTSCPSYWWNGDKYLGPAVLMQAYRWMIDSRDDFTEERLAKLQDPFSLYRCHTIMNCTRTCPKGLNPGKAIAEIKKMMATYKEKKASV

SEQ ID NO: 237 - protein, 298 aa, Homo Sapiens
MEEKQILCVGLVVLDVISLVDKYPKEDSEIRCLSQRWQRGGNASNSCTVLSLLGAPCAFMGSMAPGHVADFLVADFRRRGVDVSQVAWQSKGDTPSSCCIINNSNGNRTIVLHDTSLPDVSATDFEKVDLTQFKWIHIEGRNASEQVKMLQRIDAHNTRQPPEQKIRVSVEVEKPREELFQLFGYGDVVFVSKDVAKHLGFQSAEEALRGLYGRVRKGAVLVCAWAEEGADALGPDGKLLHSDAFPPPRVVDTLGAGDTFNASVIFSLSQGRSVQEALRFGCQVAGKKCGLQGFDGIV

SEQ ID NO: 238 - protein, 507 aa, Homo Sapiens
MMGHRPVLVLSQNTKRESGRKVQSGNINAAKIQVQHPAAKSMIEISRTQDEEVGDGTTSVIILAGEMLSVAEHFLEQQMHPTVVISAYRKALDDMISTLKKISIPVDISDSDMMLNIINSSITTKAISRWSSLACNIALDAVKMVQFEENGRKEIDIKKYARVEKIPGGIIEDSCVLRGVMINKDVTHPRMRRYIKNPRIVLLDSSLEYKKGESQTDIEITREEDFTRILQMEEEYIQQLCEDIIQLKPDVVITEKGISDLAQHYLMRANITAIRRVRKTDNNRIARACGARIVSRPEELREDDVGTGAGLLEIKKIGDEYFTFITDCKDPKACTILLRGASKEILSEVERNLQDAMQVCRNVLLDPQLVPGGGASEMAVAHALTEKSKAMTGVEQWPYRAVAQALEVIPRTLIQNCGASTIRLLTSLRAKHTQENCETWGVNGETGTLVDMKELGIWEPLAVKLQTYKTAVETAVLLLRIDDIVSGHKKKGDDQSRQGGAPDAGQE

SEQ ID NO: 239 - protein, 995 aa, Homo Sapiens
MARALCRLPRRGLWLLLAHHLFMTTACQEANYGALLRELCLTQFQVDMEAVGETLWCDWGRTIRSWASLVLAFLGVCLGITLAVDRSNFKTCEESSFCKRQRSIRPGLSPYRALLDSLQLGPDSLTVHLIHEVTKVLLVLELQGLQKNMTRFRIDELEPRRPRYRVPDVLVADPPIARLSVSGRDENSVELTMAEGPYKIILTARPFRLDLLEDRSLLLSVNARGLLEFEHQRAPRVSQGSKDPAEGDGAQPEETPRDGDKPEETQGKAEKDEPGAWEETFKTHSDSKPYGPMSVGLDFSLPGMEHVYGIPEHADNLRLKVTEGGEPYRLYNLDVFQYELYNPMALYGSVPVLLAHNPHRDLGIFWLNAAETWVDISSNTAGKTLFGKMMDYLQGSGETPQTDVRWMSETGIIDVFLLLGPSISDVFRQYASLTGTQALPPLFSLGYHQSRWNYRDEADVLEVDQGFDDHNLPCDVIWLDIEHADGKRYFTWDPSRFPQPRTMLERLASKRRKLVAIVDPHIKVDSGYRVHEELRNLGLYVKTRDGSDYEGWCWPGSAGYPDFTNPTMRAWWANMFSYDNYEGSAPNLFVWNDMNEPSVFNGPEVTMLKDAQHYGGWEHRDVHNIYGLYVHMATADGLRQRSGGMERPFVLARAFFAGSQRFGAVWTGDNTAEWDHLKISIPMCLSLGLVGLSFCGADVGGFFKNPEPELLVRWYQMGAYQPFFRAHAHLDTGRREPWLLPSQHNDIIRDALGQRYSLLPFWYTLLYQAHREGIPVMRPLWVQYPQDVTTFNIDDQYLLGDALLVHPVSDSGAHGVQVYLPGQGEVWYDIQSYQKHHGPQTLYLPVTLSSIPVFQRGGTIVPRWMRVRRSSECMKDDPITLFVALSPQGTAQGELFLDDGHTFNYQTRQEFLLRRFSFSGNTLVSSSADPEGHFETPIWIERVVIIGAGKPAAVVLQTKGSPESRLSFQHDPETSVLVLRKPGINVASDWSIHLR

SEQ ID NO: 240 - protein, 343 aa, Homo Sapiens
MLATRLSRPLSRLPGKTLSACDRENGARRPLLLGSTSFIPIGRRTYASAAEPVGSKAVLVTGCDSGFGFSLAKHLHSKGFLVFAGCLMKDKGHDGVKELDSLNSDRLRTVQLNVCSSEEVEKVVEIVRSSLKDPEKGMWGLVNNAGISTFGEVEFTSLETYKQVAEVNLWGTVRMTKSFLPLIRRAKGRVVNISSMLGRMANPARSPYCITKFGVEAFSDCLRYEMYPLGVKVSVVEPGNFIAATSLYSPESIQAIAKKMWEELPEVVRKDYGKKYFDEKIAKMETYCSSGSTDTSPVIDAVTHALTATTPYTRYHPMDYYWWLRMQIMTHLPGAISDMIYIR

SEQ ID NO: 241 - protein, 1020 aa, Homo Sapiens
MQSCARAWGLRLGRGVGGGRRLAGGSGPCWAPRSRDSSSGGGDSAAAGASRLLERLLPRHDDFARRHIGPGDKDQREMLQTLGLASIDELIEKTVPANIRLKRPLKMEDPVCENEILATLHAISSKNQIWRSYIGMGYYNCSVPQTILRNLLENSGWITQYTPYQPEVSQGRLESLLNYQTMVCDITGLDMANASLLDEGTAAAEALQLCYRHNKRRKFLVDPRCHPQTIAVVQTRAKYTGVLTELKLPCEMDFSGKDVSGVLFQYPDTEGKVEDFTELVERAHQSGSLACCATDLLALCILRPPGEFGVDIALGSSQRFGVPLGYGGPHAAFFAVRESLVRMMPGRMVGVTRDATGKEVYRLALQTREQHIRRDKATSNICTAQALLANMAAMFAIYHGSHGLEHIARRVHNATLILSEGLKRAGHQLQHDLFFDTLKIQCGCSVKEVLGRAAQRQINFRLFEDGTLGISLDETVNEKDLDDLLWIFGCESSAELVAESMGEECRGIPGSVFKRTSPFLTHQVFNSYHSETNIVRYMKKLENKDISLVHSMIPLGSCTMKLNSSSELAPITWKEFANIHPFVPLDQAQGYQQLFRELEKDLCELTGYDQVCFQPNSGAQGEYAGLATIRAYLNQKGEGHRTVCLIPKSAHGTNPASAHMAGMKIQPVEVDKYGNIDAVHLKAMVDKHKENLAAIMITYPSTNGVFEENISDVCDLIHQHGGQVYLDGANMNAQVGICRPGDFGSDVSHLNLHKTFCIPHGGGGPGMGPIGVKKHLAPFLPNHPVISLKRNEDACPVGTVSAAPWGSSSILPISWAYIKMMGGKGLKQATETAILNANYMAKRLETHYRILFRGARGYVGHEFILDTRPFKKSANIEAVDVAKRLQDYGFHAPTMSWPVAGTLMVEPTESEDKAELDRFCDAMISIRQEIADIEEGRIDPRVNPLKMSPHSLTCVTSSHWDRPYSREVAAFPLPFVKPENKFWPTIARIDDIYGDQHLVCTCPPMEVYESPFSEQKRASS

SEQ ID NO: 242 - protein, 295 aa, Homo Sapiens
MVDSVYRTRSLGVAAEGLPDQYADGEAARVWQLYIGDTRSRTAEYKAWLLGLLRQHGCQRVLDVACGTGVDSIMLVEEGFSVTSVDASDKMLKYALKERWNRRHEPAFDKWVIEEANWMTLDKDVPQSAEGGFDAVICLGNSFAHLPDCKGDQSEHRLALKNIASMVRAGGLLVIDHRNYDHILSTGCAPPGKNIYYKSDLTKDVTTSVLIVNNKAHMVTLDYTVQVPGAGQDGSPGLSKFRLSYYPHCLASFTELLQAAFGGKCQHSVLGDFKPYKPGQTYIPCYFIHVLKRTD

SEQ ID NO: 243 - protein, 296 aa, Homo Sapiens
MMLPLQGAQMLQMLEKSLRKSLPASLKVYGTVFHINHGNPFNLKAVVDKWPDFNTVVVCPQEQDMTDDLDHYTNTYQIYSKDPQNCQEFLGSPELINWKQHLQIQSSQPSLNEAIQNLAAIKSFKVKQTQRILYMAAETAKELTPFLLKSKILSPNGGKPKAINQEMFKLSSMDVTHAHLVNKFWHFGGNERSQRFIERCIQTFPTCCLLGPEGTPVCWDLMDQTGEMRMAGTLPEYRLHGLVTYVIYSHAQKLGKLGFPVYSHVDYSNEAMQKMSYTLQHVPIPRSWNQWNCVPL

SEQ ID NO: 244 - protein, 282 aa, Homo Sapiens
MALKQISSNKCFGGLQKVFEHDSVELNCKMKFAVYLPPKAETGKCPALYWLSGLTCTEQNFISKSGYHQSASEHGLVVIAPDTSPRGCNIKGEDESWDFGTGAGFYVDATEDPWKTNYRMYSYVTEELPQLINANFPVDPQRMSIFGHSMGGHGALICALKNPGKYKSVSAFAPICNPVLCPWGKKAFSGYLGTDQSKWKAYDATHLVKSYPGSQLDILIDQGKDDQFLLDGQLLPDNFIAACTEKKIPVVFRLQEGYDHSYYFIATFITDHIRHHAKYLNA

SEQ ID NO: 245 - protein, 314 aa, Homo Sapiens
MLVSGRRRLLTVLLQAQKWPFQPSRDMRLVQFRAPHLVGPHLGLETGNGGGVINLNAFDPTLPKTMTQFLEQGEATLSVARRALAAQLPVLPRSEVTFLAPVTRPDKVVCVGMNYVDHCKEQNVPVPKEPIIFSKFASSIVGPYDEVVLPPQSQEVDWEVELAVVIGKKGKHIKATDAMAHVAGFTVAHDVSARDWQMRRNGKQWLLGKTFDTFCPLGPALVTKDSVADPHNLKICCRVNGEVVQSGNTNQMVFKTEDLIAWVSQFVTFYPGDVILTGTPPGVGVFRKPPVFLKKGDEVQCEIEELGVIINKVV

SEQ ID NO: 246 - protein, 910 aa, Homo Sapiens
MASSAQSGGSSGGPAVPTVQRGIIKMVLSGCAIIVRGQPRGGPPPERQINLSNIRAGNLARRAAATQPDAKDTPDEPWAFPAREFLRKKLIGKEVCFTIENKTPQGREYGMIYLGKDTNGENIAESLVAEGLATRREGMRANNPEQNRLSECEEQAKAAKKGMWSEGNGSHTIRDLKYTIENPRHFVDSHHQKPVNAIIEHVRDGSVVRALLLPDYYLVTVMLSGIKCPTFRREADGSETPEPFAAEAKFFTESRLLQRDVQIILESCHNQNILGTILHPNGNITELLLKEGFARCVDWSIAVYTRGAEKLRAAERFAKERRLRIWRDYVAPTANLDQKDKQFVAKVMQVLNADAIVVKLNSGDYKTIHLSSIRPPRLEGENTQDKNKKLRPLYDIPYMFEAREFLRKKLIGKKVNVTVDYIRPASPATETVPAFSERTCATVTIGGINIAEALVSKGLATVIRYRQDDDQRSSHYDELLAAEARAIKNGKGLHSKKEVPIHRVADISGDTQKAKQFLPFLQRAGRSEAVVEYVFSGSRLKLYLPKETCLITFLLAGIECPRGARNLPGLVQEGEPFSEEATLFTKELVLQREVEVEVESMDKAGNFIGWLHIDGANLSVLLVEHALSKVHFTAERSSYYKSLLSAEEAAKQKKEKVWAHYEEQPVEEVMPVLEEKERSASYKPVFVTEITDDLHFYVQDVETGTQLEKLMENMRNDIASHPPVEGSYAPRRGEFCIAKFVDGEWYRARVEKVESPAKIHVFYIDYGNREVLPSTRLGTLSPAFSTRVLPAQATEYAFAFIQVPQDDDARTDAVDSVVRDIQNTQCLLNVEHLSAGCPHVTLQFADSKGDVGLGLVKEGLVMVEVRKEKQFQKVITEYLNAQESAKSARLNLWRYGDFRADDADEFGYSR

SEQ ID NO: 247 - protein, 906 aa, Homo Sapiens
MPLRLDIKRKLTARSDRVKSVDLHPTEPWMLASLYNGSVCVWNHETQTLVKTFEVCDLPVRAAKFVARKNWVVTGADDMQIRVFNYNTLERVHMFEAHSDYIRCIAVHPTQPFILTSSDDMLIKLWDWDKKWSCSQVFEGHTHYVMQIVINPKDNNQFASASLDRTIKVWQLGSSSPNFTLEGHEKGVNCIDYYSGGDKPYLISGADDRLVKIWDYQNKTCVQTLEGHAQNVSCASFHPELPIIITGSEDGTVRIWHSSTYRLESTLNYGMERVWCVASLRGSNNVALGYDEGSIIVKLGREEPAMSMDANGKIIWAKHSEVQQANLKAMGDAEIKDGERLPLAVKDMGSCEIYPQTIQHNPNGRFVVVCGDGEYIIYTAMALRNKSFGSAQEFAWAHDSSEYAIRESNSIVKIFKNFKEKKSFKPDFGAESIYGGFLLGVRSVNGLAFYDWDNTELIRRIEIQPKHIFWSDSGELVCIATEESFFILKYLSEKVLAAQETHEGVTEDGIEDAFEVLGEIQEIVKTGLWVGDCFIYTSSVNRLNYYVGGEIVTIAHLDRTMYLLGYIPKDNRLYLGDKELNIISYSLLVSVLEYQTAVMRRDFSMADKVLPTIPKEQRTRVAHFLEKQGFKQQALTVSTDPEHRFELALQLGELKIAYQLAVEAESEQKWKQLAELAISKCQFGLAQECLHHAQDYGGLLLLATASGNANMVNKLAEGAERDGKNNVAFMSYFLQGKVDACLELLIRTGRLPEAAFLARTYLPSQVSRVVKLWRENLSKVNQKAAESLADPTEYENLFPGLKEAFVVEEWVKETHADLWPAKQYPLVTPNEERNVMEEGKDFQPSRSTAQQELDGKPASPTPVIVASHTANKEEKSLLELEVDLDNLELEDIDTTDINLDEDILDD

SEQ ID NO: 248 - protein, 372 aa, Homo Sapiens
MSKSESPKEPEQLRKLFIGGLSFETTDESLRSHFEQWGTLTDCVVMRDPNTKRSRGFGFVTYATVEEVDAAMNARPHKVDGRVVEPKRAVSREDSQRPGAHLTVKKIFVGGIKEDTEEHHLRDYFEQYGKIEVIEIMTDRGSGKKRGFAFVTFDDHDSVDKIVIQKYHTVNGHNCEVRKALSKQEMASASSSQRGRSGSGNFGGGRGGGFGGNDNFGRGGNFSGRGGFGGSRGGGGYGGSGDGYNGFGNDGGYGGGGPGYSGGSRGYGSGGQGYGNQGSGYGGSGSYDSYNNGGGGGFGGGSGSNFGGGGSYNDFGNYNNQSSNFGPMKGGNFGGRSSGPYGGGGQYFAKPRNQGGYGGSSSSSSYGSGRRF

SEQ ID NO: 249 - protein, 452 aa, Homo Sapiens
MSTAVLENPGLGRKLSDFGQETSYIEDNCNQNGAISLIFSLKEEVGALAKVLRLFEENDVNLTHIESRPSRLKKDEYEFFTHLDKRSLPALTNIIKILRHDIGATVHELSRDKKKDTVPWFPRTIQELDRFANQILSYGAELDADHPGFKDPVYRARRKQFADIAYNYRHGQPIPRVEYMEEEKKTWGTVFKTLKSLYKTHACYEYNHIFPLLEKYCGFHEDNIPQLEDVSQFLQTCTGFRLRPVAGLLSSRDFLGGLAFRVFHCTQYIRHGSKPMYTPEPDICHELLGHVPLFSDRSFAQFSQEIGLASLGAPDEYIEKLATIYWFTVEFGLCKQGDSIKAYGAGLLSSFGELQYCLSEKPKLLPLELEKTAIQNYTVTEFQPLYYVAESFNDAKEKVRNFAATIPRPFSVRYDPYTQRIEVLDNTQQLKILADSINSEIGILCSALQKIK

SEQ ID NO: 250 - protein, 449 aa, Homo Sapiens
MMLSTEGREGFVVKVRGLPWSCSADEVMRFFSDCKIQNGTSGIRFIYTREGRPSGEAFVELESEEEVKLALKKDRETMGHRYVEVFKSNSVEMDWVLKHTGPNSPDTANDGFVRLRGLPFGCSKEEIVQFFSGLEIVPNGMTLPVDFQGRSTGEAFVQFASQEIAEKALKKHKERIGHRYIEIFKSSRAEVRTHYDPPRKLMAMQRPGPYDRPGAGRGYNSIGRGAGFERMRRGAYGGGYGGYDDYGGYNDGYGFGSDRFGRDLNYCFSGMSDHRYGDGGSSFQSTTGHCVHMRGLPYRATENDIYNFFSPLNPMRVHIEIGPDGRVTGEADVEFATHEDAVAAMAKDKANMQHRYVELFLNSTAGTSGGAYDHSYVELFLNSTAGASGGAYGSQMMGGMGLSNQSSYGGPASQQLSGGYGGGYGGQSSMSGYDQVLQENSSDYQSNLA

SEQ ID NO: 251 - protein, 216 aa, Homo Sapiens
MQAGKPILYSYFRSSCSWRVRIALALKGIDYETVPINLIKDGGQQFSKDFQALNPMKQVPTLKIDGITIHQSLAIIEYLEEMRPTPRLLPQDPKKRASVRMISDLIAGGIQPLQNLSVLKQVGEEMQLTWAQNAITCGFNALEQILQSTAGIYCVGDEVTMADLCLVPQVANAERFKVDLTPYPTISSINKRLLVLEAFQVSHPCRQPDTPTELRA

SEQ ID NO: 252 - protein, 98 aa, Homo Sapiens
MASVVGIFSHSSVSVPVKDKKLLEVKLGELPSWILMRDFSPSGIFGAFQRGYYRYYNKYINVKKGSISGITMVLACYVLFSYSFSYKHLKHERLRKYH

SEQ ID NO: 253 - protein, 681 aa, Homo Sapiens
MGSPVHRVSLGDTWSRQMHPDIESERYMQSFDVERLTNILDGGAQNTALRRKVESIIHSYPEFSCKDNYFMTQNERYKAAMRRAFHIRLIARRLGWLEDGRELGYAYRALSGDVALNIHRVFVRALRSLGSEEQIAKWDPLCKNIQIIATYAQTELGHGTYLQGLETEATYDAATQEFVIHSPTLTATKWWPGDLGRSATHALVQAQLICSGARRGMHAFIVPIRSLQDHTPLPGIIIGDIGPKMDFDQTDNGFLQLNHVRVPRENMLSRFAQVLPDGTYVKLGTAQSNYLPMVVVRVELLSGEILPILQKACVIAMRYSVIRRQSRLRPSDPEAKVLDYQTQQQKLFPQLAISYAFHFLAVSLLEFFQHSYTAILNQDFSFLPELHALSTGMKAMMSEFCTQGAEMCRRACGGHGYSKLSGLPSLVTKLSASCTYEGENTVLYLQVARFLVKSYLQTQMSPGSTPQRSLSPSVAYLTAPDLARCPAQRAADFLCPELYTTAWAHVAVRLIKDSVQHLQTLTQSGADQHEAWNQTTVIHLQAAKVHCYYVTVKGFTEALEKLENEPAIQQVLKRLCDLHAIHGILTNSGDFLHDAFLSGAQVDMARTAYLDLLRLIRKDAILLTDAFDFTDQCLNSALGCYDGNVYERLFQWAQKSPTNTQENPAYEEYIRPLLQSWRSKL

SEQ ID NO: 254 - protein, 534 aa, Homo Sapiens
MKQEGSARRRGADKAKPPPGGGEQEPPPPPAPQDVEMKEEAATGGGSTGEADGKTAAAAAEHSQRELDTVTLEDIKEHVKQLEKAVSGKEPRFVLRALRMLPSTSRRLNHYVLYKAVQGFFTSNNATRDFLLPFLEEPMDTEADLQFRPRTGKAASTPLLPEVEAYLQLLVVIFMMNSKRYKEAQKISDDLMQKISTQNRRALDLVAAKCYYYHARVYEFLDKLDVVRSFLHARLRTATLRHDADGQATLLNLLLRNYLHYSLYDQAEKLVSKSVFPEQANNNEWARYLYYTGRIKAIQLEYSEARRTMTNALRKAPQHTAVGFKQTVHKLLIVVELLLGEIPDRLQFRQPSLKRSLMPYFLLTQAVRTGNLAKFNQVLDQFGEKFQADGTYTLIIRLRHNVIKTGVRMISLSYSRISLADIAQKLQLDSPEDAEFIVAKAIRDGVIEASINHEKGYVQSKEMIDIYSTREPQLAFHQRISFCLDIHNMSVKAMRFPPKSYNKDLESAEERREREQQDLEFAKEMAEDDDDSFP

SEQ ID NO: 255 - protein, 531 aa, Homo Sapiens
MDGIVPDIAVGTKRGSDELFSTCVTNGPFIMSSNSASAANGNDSKKFKGDSRSAGVPSRVIHIRKLPIDVTEGEVISLGLPFGKVTNLLMLKGKNQAFIEMNTEEAANTMVNYYTSVTPVLRGQPIYIQFSNHKELKTDSSPNQARAQAALQAVNSVQSGNLALAASAAAVDAGMAMAGQSPVLRIIVENLFYPVTLDVLHQIFSKFGTVLKIITFTKNNQFQALLQYADPVSAQHAKLSLDGQNIYNACCTLRIDFSKLTSLNVKYNNDKSRDYTRPDLPSGDSQPSLDQTMAAAFGLSVPNVHGALAPLAIPSAAAAAAAAGRIAIPGLAGAGNSVLLVSNLNPERVTPQSLFILFGVYGDVQRVKILFNKKENALVQMADGNQAQLAMSHLNGHKLHGKPIRITLSKHQNVQLPREGQEDQGLTKDYGNSPLHRFKKPGSKNFQNIFPPSATLHLSNIPPSVSEEDLKVLFSSNGGVVKGFKFFQKDRKMALIQMGSVEEAVQALIDLHNHDLGENHHLRVSFSKSTI

SEQ ID NO: 256 - protein, 180 aa, Homo Sapiens
MGLTISSLFSRLFGKKQMRILMVGLDAAGKTTILYKLKLGEIVTTIPTIGFNVETVEYKNICFTVWDVGGQDRIRPLWKHYFQNTQGLIFVVDSNDRERIQEVADELQKMLLVDELRDAVLLLFANKQDLPNAMAISEMTDKLGLQSLRNRTWYVQATCATQGTGLYEGLDWLSNELSKR

SEQ ID NO: 257 - protein, 478 aa, Homo Sapiens
MAPLRPLLILALLAWVALADQESCKGRCTEGFNVDKKCQCDELCSYYQSCCTDYTAECKPQVTRGDVFTMPEDEYTVYDDGEEKNNATVHEQVGGPSLTSDLQAQSKGNPEQTPVLKPEEEAPAPEVGASKPEGIDSRPETLHPGRPQPPAEEELCSGKPFDAFTDLKNGSLFAFRGQYCYELDEKAVRPGYPKLIRDVWGIEGPIDAAFTRINCQGKTYLFKGSQYWRFEDGVLDPDYPRNISDGFDGIPDNVDAALALPAHSYSGRERVYFFKGKQYWEYQFQHQPSQEECEGSSLSAVFEHFAMMQRDSWEDIFELLFWGRTSAGTRQPQFISRDWHGVPGQVDAAMAGRIYISGMAPRPSLAKKQRFRHRNRKGYRSQRGHSRGRNQNSRRPSRATWLSLFSSEESNLGANNYDDYRMDWLVPATCEPIQSVFFFSGDKYYRVNLRTRRVDTVDPPYPRSIAQYWLGCPAPGHL

SEQ ID NO: 258 - protein, 519 aa, Homo Sapiens
MSVSVLSPSRLLGDVSGILQAASLLILLLLLIKAVQLYLHRQWLLKALQQFPCPPSHWLFGHIQELQQDQELQRIQKWVETFPSACPHWLWGGKVRVQLYDPDYMKVILGRSDPKSHGSYRFLAPWIGYGLLLLNGQTWFQHRRMLTPAFHYDILKPYVGLMADSVRVMLDKWEELLGQDSPLEVFQHVSLMTLDTIMKCAFSHQGSIQVDRNSQSYIQAISDLNNLVFSRVRNAFHQNDTIYSLTSAGRWTHRACQLAHQHTDQVIQLRKAQLQKEGELEKIKRKRHLDFLDILLLAKMENGSILSDKDLRAEVDTFMFEGHDTTASGISWILYALATHPKHQERCREEIHSLLGDGASITWNHLDQMPYTTMCIKEALRLYPPVPGIGRELSTPVTFPDGRSLPKGIMVLLSIYGLHHNPKVWPNPEVFDPFRFAPGSAQHSHAFLPFSGGSRNCIGKQFAMNELKVATALTLLRFELLPDPTRIPIPIARLVLKSKNGIHLRLRRLPNPCEDKDQL

SEQ ID NO: 259 - protein, 602 aa, Homo Sapiens
MPSAKQRGSKGGHGAASPSEKGAHPSGGADDVAKKPPPAPQQPPPPPAPHPQQHPQQHPQNQAHGKGGHRGGGGGGGKSSSSSSASAAAAAAAASSSASCSRRLGRALNFLFYLALVAAAAFSGWCVHHVLEEVQQVRRSHQDFSRQREELGQGLQGVEQKVQSLQATFGTFESILRSSQHKQDLTEKAVKQGESEVSRISEVLQKLQNEILKDLSDGIHVVKDARERDFTSLENTVEERLTELTKSINDNIAIFTEVQKRSQKEINDMKAKVASLEESEGNKQDLKALKEAVKEIQTSAKSREWDMEALRSTLQTMESDIYTEVRELVSLKQEQQAFKEAADTERLALQALTEKLLRSEESVSRLPEEIRRLEEELRQLKSDSHGPKEDGGFRHSEAFEALQQKSQGLDSRLQHVEDGVLSMQVASARQTESLESLLSKSQEHEQRLAALQGRLEGLGSSEADQDGLASTVRSLGETQLVLYGDVEELKRSVGELPSTVESLQKVQEQVHTLLSQDQAQAARLPPQDFLDRLSSLDNLKASVSQVEADLKMLRTAVDSLVAYSVKIETNENNLESAKGLLDDLRNDLDRLFVKVEKIHEKV

SEQ ID NO: 260 - protein, 124 aa, Homo Sapiens
MHRDSCPLDCKVYVGNLGNNGNKTELERAFGYYGPLRSVWVARNPPGFAFVEFEDPRDAADAVRELDGRTLCGCRVRVELSNGEKRSRNRGPPPSWGRRPRDDYRRRSPPPRRRVTIMSLLTTL

SEQ ID NO: 261 - protein, 274 aa, Homo Sapiens
MPRNLLYSLLSSHLSPHFSTSVTSAKVAVNGVQLHYQQTGEGDHAVLLLPGMLGSGETDFGPQLKNLNKKLFTVVAWDPRGYGHSRPPDRDFPADFFERDAKDAVDLMKALKFKKVSLLGWSDGGITALIAAAKYPSYIHKMVIWGANAYVTDEDSMIYEGIRDVSKWSERTRKPLEALYGYDYFARTCEKWVDGIRQFKHLPDGNICRHLLPRVQCPALIVHGEKDPLVPRFHADFIHKHVKGSRLHLMPEGKHNLHLRFADEFNKLAEDFLQ

SEQ ID NO: 262 - protein, 1532 aa, Homo Sapiens
MGHSKQIRILLLNEMEKLEKTLFRLEQGYELQFRLGPTLQGKAVTVYTNYPFPGETFNREKFRSLDWENPTEREDDSDKYCKLNLQQSGSFQYYFLQGNEKSGGGYIVVDPILRVGADNHVLPLDCVTLQTFLAKCLGPFDEWESRLRVAKESGYNMIHFTPLQTLGLSRSCYSLANQLELNPDFSRPNRKYTWNDVGQLVEKLKKEWNVICITDVVYNHTAANSKWIQEHPECAYNLVNSPHLKPAWVLDRALWRFSCDVAEGKYKEKGIPALIENDHHMNSIRKIIWEDIFPKLKLWEFFQVDVNKAVEQFRRLLTQENRRVTKSDPNQHLTIIQDPEYRRFGCTVDMNIALTTFIPHDKGPAAIEECCNWFHKRMEELNSEKHRLINYHQEQAVNCLLGNVFYERLAGHGPKLGPVTRKHPLVTRYFTFPFEEIDFSMEESMIHLPNKACFLMAHNGWVMGDDPLRNFAEPGSEVYLRRELICWGDSVKLRYGNKPEDCPYLWAHMKKYTEITATYFQGVRLDNCHSTPLHVAEYMLDAARNLQPNLYVVAELFTGSEDLDNVFVTRLGISSLIREAMSAYNSHEEGRLVYRYGGEPVGSFVQPCLRPLMPAIAHALFMDITHDNECPIVHRSAYDALPSTTIVSMACCASGSTRGYDELVPHQISVVSEERFYTKWNPEALPSNTGEVNFQSGIIAARCAISKLHQELGAKGFIQVYVDQVDEDIVAVTRHSPSIHQSVVAVSRTAFRNPKTSFYSKEVPQMCIPGKIEEVVLEARTIERNTKPYRKDENSINGTPDITVEIREHIQLNESKIVKQAGVATKGPNEYIQEIEFENLSPGSVIIFRVSLDPHAQVAVGILRNHLTQFSPHFKSGSLAVDNADPILKIPFASLASRLTLAELNQILYRCESEEKEDGGGCYDIPNWSALKYAGLQGLMSVLAEIRPKNDLGHPFCNNLRSGDWMIDYVSNRLISRSGTIAEVGKWLQAMFFYLKQIPRYLIPCYFDAILIGAYTTLLDTAWKQMSSFVQNGSTFVKHLSLGSVQLCGVGKFPSLPILSPALMDVPYRLNEITKEKEQCCVSLAAGLPHFSSGIFRCWGRDTFIALRGILLITGRYVEARNIILAFAGTLRHGLIPNLLGEGIYARYNCRDAVWWWLQCIQDYCKMVPNGLDILKCPVSRMYPTDDSAPLPAGTLDQPLFEVIQEAMQKHMQGIQFRERNAGPQIDRNMKDEGFNITAGVDEETGFVYGGNRFNCGTWMDKMGESDRARNRGIPATPRDGSAVEIVGLSKSAVRWLLELSKKNIFPYHEVTVKRHGKAIKVSYDEWNRKIQDNFEKLFHVSEDPSDLNEKHPNLVHKRGIYKDSYGASSPWCDYQLRPNFTIAMVVAPELFTTEKAWKALEIAEKKLLGPLGMKTLDPDDMVYCGIYDNALDNDNYNLAKGFNYHQGPEWLWPIGYFLRAKLYFSRLMGPETTAKTIVLVKNVLSRHYVHLERSPWKGLPELTNENAQYCPFSCETQAWSIATILETLYDL

SEQ ID NO: 263 - protein, 417 aa, Homo Sapiens
MSLSNKLTLDKLDVKGKRVVMRVDFNVPMKNNQITNNQRIKAAVPSIKFCLDNGAKSVVLMSHLGRPDGVPMPDKYSLEPVAVELKSLLGKDVLFLKDCVGPEVEKACANPAAGSVILLENLRFHVEEEGKGKDASGNKVKAEPAKIEAFRASLSKLGDVYVNDAFGTAHRAHSSMVGVNLPQKAGGFLMKKELNYFAKALESPERPFLAILGGAKVADKIQLINNMLDKVNEMIIGGGMAFTFLKVLNNMEIGTSLFDEEGAKIVKDLMSKAEKNGVKITLPVDFVTADKFDENAKTGQATVASGIPAGWMGLDCGPESSKKYAEAVTRAKQIVWNGPVGVFEWEAFARGTKALMDEVVKATSRGCITIIGGGDTATCCAKWNTEDKVSHVSTGGGASLELLEGKVLPGVDALSNI

SEQ ID NO: 264 - protein, 623 aa, Homo Sapiens
MATEHVNGNGTEEPMDTTSAVIHSENFQTLLDAGLPQKVAEKLDEIYVAGLVAHSDLDERAIEALKEFNEDGALAVLQQFKDSDLSHVQNKSAFLCGVMKTYRQREKQGTKVADSSKGPDEAKIKALLERTGYTLDVTTGQRKYGGPPPDSVYSGQQPSVGTEIFVGKIPRDLFEDELVPLFEKAGPIWDLRLMMDPLTGLNRGYAFVTFCTKEAAQEAVKLYNNHEIRSGKHIGVCISVANNRLFVGSIPKSKTKEQILEEFSKVTEGLTDVILYHQPDDKKKNRGFCFLEYEDHKTAAQARRRLMSGKVKVWGNVGTVEWADPIEDPDPEVMAKVKVLFVRNLANTVTEEILEKAFSQFGKLERVKKLKDYAFIHFDERDGAVKAMEEMNGKDLEGENIEIVFAKPPDQKRKERKAQRQAAKNQMYDDYYYYGPPHMPPPTRGRGRGGRGGYGYPPDYYGYEDYYDYYGYDYHNYRGGYEDPYYGYEDFQVGARGRGGRGARGAAPSRGRGAAPPRGRAGYSQRGGPGSARGVRGARGGAQQQRGRGVRGARGGRGGNVGGKRKADGYNQPDSKRRQTNNQNWGSQPIAQQPLQGGDHSGNYGYKSENQEFYQDTFGQQWK

SEQ ID NO: 265 - protein, 633 aa, Homo Sapiens
MANQVNGNAVQLKEEEEPMDTSSVTHTEHYKTLIEAGLPQKVAERLDEIFQTGLVAYVDLDERAIDALREFNEEGALSVLQQFKESDLSHVQNKSAFLCGVMKTYRQREKQGSKVQESTKGPDEAKIKALLERTGYTLDVTTGQRKYGGPPPDSVYSGVQPGIGTEVFVGKIPRDLYEDELVPLFEKAGPIWDLRLMMDPLSGQNRGYAFITFCGKEAAQEAVKLCDSYEIRPGKHLGVCISVANNRLFVGSIPKNKTKENILEEFSKVTEGLVDVILYHQPDDKKKNRGFCFLEYEDHKSAAQARRRLMSGKVKVWGNVVTVEWADPVEEPDPEVMAKVKVLFVRNLATTVTEEILEKSFSEFGKLERVKKLKDYAFVHFEDRGAAVKAMDEMNGKEIEGEEIEIVLAKPPDKKRKERQAARQASRSTAYEDYYYHPPPRMPPPIRGRGRGGGRGGYGYPPDYYGYEDYYDDYYGYDYHDYRGGYEDPYYGYDDGYAVRGRGGGRGGRGAPPPPRGRGAPPPRGRAGYSQRGAPLGPPRGSRGGRGGPAQQQRGRGSRGSRGNRGGNVGGKRKADGYNQPDSKRRQTNNQQNWGSQPIAQQPLQQGGDYSGNYGYNNDNQEFYQDTYGQQWK

SEQ ID NO: 266 - protein, 636 aa, Homo Sapiens
MNPSAPSYPMASLYVGDLHPDVTEAMLYEKFSPAGPILSIRVCRDMITRRSLGYAYVNFQQPADAERALDTMNFDVIKGKPVRIMWSQRDPSLRKSGVGNIFIKNLDKSIDNKALYDTFSAFGNILSCKVVCDENGSKGYGFVHFETQEAAERAIEKMNGMLLNDRKVFVGRFKSRKEREAELGARAKEFTNVYIKNFGEDMDDERLKDLFGKFGPALSVKVMTDESGKSKGFGFVSFERHEDAQKAVDEMNGKELNGKQIYVGRAQKKVERQTELKRKFEQMKQDRITRYQGVNLYVKNLDDGIDDERLRKEFSPFGTITSAKVMMEGGRSKGFGFVCFSSPEEATKAVTEMNGRIVATKPLYVALAQRKEERQAHLTNQYMQRMASVRAVPNPVINPYQPAPPSGYFMAAIPQTQNRAAYYPPSQIAQLRPSPRWTAQGARPHPFQNMPGAIRPAAPRPPFSTMRPASSQVPRVMSTQRVANTSTQTMGPRPAAAAAAATPAVRTVPQYKYAAGVRNPQQHLNAQPQVTMQQPAVHVQGQEPLTASMLASAPPQEQKQMLGERLFPLIQAMHPTLAGKITGMLLEIDNSELLHMLESPESLRSKVDEAVAVLQAHQAKEAAQKAVNSATGVPTV

SEQ ID NO: 267 - protein, 806 aa, Homo Sapiens
MSSSPVNVKKLKVSELKEELKKRRLSDKGLKAELMERLQAALDDEEAGGRPAMEPGNGSLDLGGDSAGRSGAGLEQEAAAGGDEEEEEEEEEEEGISALDGDQMELGEENGAAGAADSGPMEEEEAASEDENGDDQGFQEGEDELGDEEEGAGDENGHGEQQPQPPATQQQQPQQQRGAAKEAAGKSSGPTSLFAVTVAPPGARQGQQQAGGDGKTEQKGGDKKRGVKRPREDHGRGYFEYIEENKYSRAKSPQPPVEEEDEHFDDTVVCLDTYNCDLHFKISRDRLSASSLTMESFAFLWAGGRASYGVSKGKVCFEMKVTEKIPVRHLYTKDIDIHEVRIGWSLTTSGMLLGEEEFSYGYSLKGIKTCNCETEDYGEKFDENDVITCFANFESDEVELSYAKNGQDLGVAFKISKEVLAGRPLFPHVLCHNCAVEFNFGQKEKPYFPIPEEYTFIQNVPLEDRVRGPKGPEEKKDCEVVMMIGLPGAGKTTWVTKHAAENPGKYNILGTNTIMDKMMVAGFKKQMADTGKLNTLLQRAPQCLGKFIEIAARKKRNFILDQTNVSAAAQRRKMCLFAGFQRKAVVVCPKDEDYKQRTQKKAEVEGKDLPEHAVLKMKGNFTLPEVAECFDEITYVELQKEEAQKLLEQYKEESKKALPPEKKQNTGSKKSNKNKSGKNQFNRGGGHRGRGGFNMRGGNFRGGAPGNRGGYNRRGNMPQRGGGGGGSGGIGYPYPRAPVFPGRGSYSNRGNYNRGGMPNRGNYNQNFRGRGNNRGYKNQSQGYNQWQQGQFWGQKPWSQHYHQGYY

SEQ ID NO: 268 - protein, 283 aa, Homo Sapiens
MAMQKIFAREILDSRGNPTVEVDLHTAKGRFRAAVPSGASTGIYEALELRDGDKGRYLGKGVLKAVENINNTLGPALLQKKLSVVDQEKVDKFMIELDGTENKSKFGANAILGVSLAVCKAGAAEKGVPLYRHIADLAGNPDLILPVPAFNVINGGSHAGNKLAMQEFMILPVGASSFKEAMRIGAEVYHHLKGVIKAKYGKDATNVGDEGGFAPNILENNEALELLKTAIQAAGYPDKVVIGMDVAASEFYRNGKYDLDFKSPDDPARHITGEKLGELYKSF

SEQ ID NO: 269 - protein, 631 aa, Homo Sapiens
MAPPGSSTVFLLALTIIASTWALTPTHYLTKHDVERLKASLDRPFTNLESAFYSIVGLSSLGAQVPDAKKACTYIRSNLDPSNVDSLFYAAQASQALSGCEISISNETKDLLLAAVSEDSSVTQIYHAVAALSGFGLPLASQEALSALTARLSKEETVLATVQALQTASHLSQQADLRSIVEEIEDLVARLDELGGVYLQFEEGLETTALFVAATYKLMDHVGTEPSIKEDQVIQLMNAIFSKKNFESLSEAFSVASAAAVLSHNRYHVPVVVVPEGSASDTHEQAILRLQVTNVLSQPLTQATVKLEHAKSVASRATVLQKTSFTPVGDVFELNFMNVKFSSGYYDFLVEVEGDNRYIANTVELRVKISTEVGITNVDLSTVDKDQSIAPKTTRVTYPAKAKGTFIADSHQNFALFFQLVDVNTGAELTPHQTFVRLHNQKTGQEVVFVAEPDNKNVYKFELDTSERKIEFDSASGTYTLYLIIGDATLKNPILWNVADVVIKFPEEEAPSTVLSQNLFTPKQEIQHLFREPEKRPPTVVSNTFTALILSPLLLLFALWIRIGANVSNFTFAPSTIIFHLGHAAMLGLMYVYWTQLNMFQTLKYLAILGSVTFLAGNRMLAQQAVKRTAH

SEQ ID NO: 270 - protein, 303 aa, Homo Sapiens
MARGKAKEEGSWKKFIWNSEKKEFLGRTGGSWFKILLFYVIFYGCLAGIFIGTIQVMLLTISEFKPTYQDRVAPPGLTQIPQIQKTEISFRPNDPKSYEAYVLNIVRFLEKYKDSAQRDDMIFEDCGDVPSEPKERGDFNHERGERKVCRFKLEWLGNCSGLNDETYGYKEGKPCIIIKLNRVLGFKPKPPKNESLETYPVMKYNPNVLPVQCTGKRDEDKDKVGNVEYFGLGNSPGFPLQYYPYYGKLLQPKYLQPLLAVQFTNLTMDTEIRIECKAYGENIGYSEKDRFQGRFDVKIEVKS

SEQ ID NO: 271 - protein, 676 aa, Homo Sapiens
MSSLQALCSGLPLRPLPENRGRQAGVPHAPVRTPSLSPVEKQLALRNALRYFPPDVQELLAPEFAQELQLYGHIYMYRFCPDIEMRAYPIEQYPCQTKVAAAIMHMIMNNLDPAVAQFPQELVTYGGNGQVFSNWAQFWLTMFYLSKMTEEQTLVMYSGHPLGLFPSSRSAPRLVITNGMVIPNYSSRTEYEKLFALGVTMYGQMTAGSYCYIGPQGIVHGTVLTVLNAARRYLGIEDLAGKVFVTSGLGGMSGAQAKAAVIVGCIGVIAEVDKAALEKRHRQGWLMEVTDSLDRCIQRLREARKKKEVLSLGYHGNVVALWERLVHELDTTGECLVDLGSDQTSCHNPFNGGYYPVQLSFTEAQSLMASNPAVFKDLVQESLRRQVSAINRLAEEKFFFWDYGNAFLLEAQRAGADVEKKGAGRTEFRYPSYVQHIMGDIFSQGFGPFRWVCTSGDPQDLAVTDELATSVLEEAIADGVKVSVKLQYMDNIRWIREAARHRLVVGSQARILYSDQKGRVAIAVAINQAIACRRIKAPVVLSRDHHDVSGTDSPFRETSNIYDGSAFCADMAVQNFVGDACRGATWVALHNGGGVGWGEVINGGFGLVLDGTPEAEGRARLMLSWDVSNGVARRCWSGNQKAYEIICQTMQENSTLVVTLPHKVEDERVLQQALQL

SEQ ID NO: 272 - protein, 354 aa, Homo Sapiens
MLFNLRILLNNAAFRNGHNFMVRNFRCGQPLQNKVQLKGRDLLTLKNFTGEEIKYMLWLSADLKFRIKQKGEYLPLLQGKSLGMIFEKRSTRTRLSTETGFALLGGHPCFLTTQDIHLGVNESLTDTARVLSSMADAVLARVYKQSDLDTLAKEASIPIINGLSDLYHPIQILADYLTLQEHYSSLKGLTLSWIGDGNNILHSIMMSAAKFGMHLQAATPKGYEPDASVTKLAEQYAKENGTKLLLTNDPLEAAHGGNVLITDTWISMGQEEEKKKRLQAFQGYQVTMKTAKVAASDWTFLHCLPRKPEEVDDEVFYSPRSLVFPEAENRKWTIMAVMVSLLTDYSPQLQKPKF

SEQ ID NO: 273 - protein, 423 aa, Homo Sapiens
MLRVRCLRGGSRGAEAVHYIGSRLGRTLTGWVQRTFQSTQAATASSRNSCAADDKATEPLPKDCPVSSYNEWDPLEEVIVGRAENACVPPFTIEVKANTYEKYWPFYQKQGGHYFPKDHLKKAVAEIEEMCNILKTEGVTVRRPDPIDWSLKYKTPDFESTGLYSAMPRDILIVVGNEIIEAPMAWRSRFFEYRAYRSIIKDYFHRGAKWTTAPKPTMADELYNQDYPIHSVEDRHKLAAQGKFVTTEFEPCFDAADFIRAGRDIFAQRSQVTNYLGIEWMRRHLAPDYRVHIISFKDPNPMHIDATFNIIGPGIVLSNPDRPCHQIDLFKKAGWTIITPPTPIIPDDHPLWMSSKWLSMNVLMLDEKRVMVDANEVPIQKMFEKLGITTIKVNIRNANSLGGGFHCWTCDVRRRGTLQSYLD

SEQ ID NO: 274 - protein, 241 aa, Homo Sapiens
MAEEQPQVELFVKAGSDGAKIGNCPFSQRLFMVLWLKGVTFNVTTVDTKRRTETVQKLCPGGQLPFLLYGTEVHTDTNKIEEFLEAVLCPPRYPKLAALNPESNTAGLDIFAKFSAYIKNSNPALNDNLEKGLLKALKVLDNYLTSPLPEEVDETSAEDEGVSQRKFLDGNELTLADCNLLPKLHIVQVVCKKYRGFTIPEAFRGVHRYLSNAYAREEFASTCPDDEEIELAYEQVAKALK

SEQ ID NO: 275 - protein, 152 aa, Homo Sapiens [sequence omitted]

SEQ ID NO: 276 - protein, 216 aa, Homo Sapiens
MAGRGGAARPNGPAAGNKICQFKLVLLGESAVGKSSLVLRFVKGQFHEYQESTIGAAFLTQTVCLDDTTVKFEIWDTAGQERYHSLAPMYYRGAQAAIVVYDITNTDTFARAKNWVKELQRQASPNIVIALAGNKADLASKRAVEFQEAQAYADDNSLLFMETSAKTAMNVNEIFMAIAKKLPKNEPQNATGAPGRNRGVDLQENNPASRSQCCSN

SEQ ID NO: 277 - protein, 394 aa, Homo Sapiens
MSGEDEQQEQTIAEDLVVTKYKMGGDIANRVLRSLVEASSSGVSVLSLCEKGDAMIMEETGKIFKKEKEMKKGIAFPTSISVNNCVCHFSPLKSDQDYILKEGDLVKIDLGVHVDGFIANVAHTFVVDVAQGTQVTGRKADVIKAAHLCAEAALRLVKPGNQNTQVTEAWNKVAHSFNCTPIEGMLSHQLKQHVIDGEKTIIQNPTDQQKKDHEKAEFEVHEVYAVDVLVSSGEGKAKDAGQRTTIYKRDPSKQYGLKMKTSRAFFSEVERRFDAMPFTLRAFEDEKKARMGVVECAKHELLQPFNVLYEKEGEFVAQFKFTVLLMPNGPMRITSGPFEPDLYKSEMEVQDAELKALLQSSASRKTQKKKKKKASKTAENATSGETLEENEAGD

SEQ ID NO: 278 - protein, 246 aa, Homo Sapiens
MSLQWTAVATFLYAEVFVVLLLCIPFISPKRWQKIFKSRLVELLVSYGNTFFVVLIVILVLLVIDAVREIRKYDDVTEKVNLQNNPGAMEHFHMKLFRAQRNLYIAGFSLLLSFLLRRLVTLISQQATLLASNEAFKKQAESASEAAKKYMEENDQLKKGAAVDGGKLDVGNAEVKLEEENRSLKADLQKLKDELASTKQKLEKAENQVLAMRKQSEGLTKEYDRLLEEHAKLQAAVDGPMDKKEE

SEQ ID NO: 279 - protein, 866 aa, Homo Sapiens
MLRPGAQLLRGLLLRSCPLQGSPGRPRSVCGREGEEKPPLSAETQWKDRAETVIIGGGCVGVSLAYHLAKAGMKDVVLLEKSELTAGSTWHAAGLTTYFHPGINLKKIHYDSIKLYEKLEEETGQVVGFHQPGSIRLATTPVRVDEFKYQMTRTGWHATEQYLIEPEKIQEMFPLLNMNKVLAGLYNPGDGHIDPYSLTMALAAGARKCGALLKYPAPVTSLKARSDGTWDVETPQGSMRANRIVNAAGFWAREVGKMIGLEHPLIPVQHQYVVTSTISEVKALKRELPVLRDLEGSYYLRQERDGLLFGPYESQEKMKVQDSWVTNGVPPGFGKELFESDLDRIMEHIKAAMEMVPVLKKADIINVVNGPITYSPDILPMVGPHQGVRNYWVAIGFGYGIIHAGGVGKYLSDWILHGEPPFDLIELDPNRYGKWTTTQYTEAKARESYGFNNIVGYPKEERFAGRPTQRVSGLYQRLESKCSMGFHAGWEQPHWFYKPGQDTQYRPSFRRTNWFEPVGSEYKQVMQRVAVTDLSPFGKFNIKGQDSIRLLDHLFANVIPKVGFTNISHMLTPKGRVYAELTVSHQSPGEFLLITGSGSELHDLRWIEEEAVKGGYDVEIKNITDELGVLGVAGPQARKVLQKLTSEDLSDDVFKFLQTKSLKVSNIPVTAIRISYTGELGWELYHRREDSVALYDAIMNAGQEEGIDNFGTYAMNALRLEKAFRAWGLEMNCDTNPLEAGLEYFVKLNKPADFIGKQALKQIKAKGLKRRLVCLTLATDDVDPEGNESIWYNGKVVGNTTSGSYSYSIQKSLAFAYVPVQLSEVGQQVEVELLGKNYPAVIIQEPLVLTEPTRNRLQKKGGKDKT

SEQ ID NO: 280 - protein, 266 aa, Homo Sapiens
MMPRSHQPPPPPHEKEQQEAIEHIDEVQNEIDRLNEQASEEILKVEQKYNKLRQPFFQKRSELIAKIPNFWVTTFVNHPQVSALLGEEDEEALHYLTRVEVTEFEDIKSGYRIDFYFDENPYFENKVLSKEFHLNESGDPSSKSTEIKWKSGKDLTKRSSQTQNKASRKRQHEEPESFFTWFTDHSDAGADELGEVIKDDIWPNPLQYYLVPDMDDEEGEGEEDDDDDEEEEGLEDIDEEGDEDEGEEDEDDDEGEEGEEDEGEDD

SEQ ID NO: 281 - protein, 126 aa, Homo Sapiens
MSIGVPIKVLHEAEGHIVTCETNTGEVYRGKLIEAEDNMNCQMSNITVTYRDGRVAQLEQVYIRGSKIRFLILPDMLKNAPMLKSMKNKNQGSGAGRGKAAILKAQVAARGRGRGMGRGNIFQKRR

SEQ ID NO: 282 - protein, 188 aa, Homo Sapiens
MAYAYLFKYIIIGDTGVEFGARMITIDGKQIKLQIWDTAGQESFRSITRSYYRGAAGALLVYDITRRDTFNHLTTWLEDARQHSNSNMVIMLIGNKSDLESRREVKKEEGEAFAREHGLIFMETSAKTASNVEEAFINTAKEIYEKIQEGVFDINNEANGIKIGPQHAATNATHAGNQGGQQAGGGCC

SEQ ID NO: 283 - protein, 702 aa, Homo Sapiens
MAAPMTPAARPEDYEAALNAALADVPELARLLEIDPYLKPYAVDFQRRYKQFSQILKNIGENEGGIDKFSRGYESFGVHRCADGGLYCKEWAPGAEGVFLTGDFNGWNPFSYPYKKLDYGKWELYIPPKQNKSVLVPHGSKLKVVITSKSGEILYRISPWAKYVVREGDNVNYDWIHWDPEHSYEFKHSRPKKPRSLRIYESHVGISSHEGKVASYKHFTCNVLPRIKGLGYNCIQLMAIMEHAYYASFGYQITSFFAASSRYGTPEELQELVDTAHSMGIIVLLDVVHSHASKNSADGLNMFDGTDSCYFHSGPRGTHDLWDSRLFAYSSWEVLRFLLSNIRWWLEEYRFDGFRFDGVTSMLYHHHGVGQGFSGDYSEYFGLQVDEDALTYLMLANHLVHTLCPDSITIAEDVSGMPALCSPISQGGGGFDYRLAMAIPDKWIQLLKEFKDEDWNMGDIVYTLTNRRYLEKCIAYAESHDQALVGDKSLAFWLMDAEMYTNMSVLTPFTPVIDRGIQLHKMIRLITHGLGGEGYLNFMGNEFGHPEWLDFPRKGNNESYHYARRQFHLTDDDLLRYKFLNNFDRDMNRLEERYGWLAAPQAYVSEKHEGNKIIAFERAGLLFIFNFHPSKSYTDYRVGTALPGKFKIVLDSDAAEYGGHQRLDHSTDFFSEAFEHNGRPYSLLVYIPSRVALILQNVDLPN

SEQ ID NO: 284 - protein, 329 aa, Homo Sapiens
MATGQKLMRAVRVFEFGGPEVLKLRSDIAVPIPKDHQVLIKVHACGVNPVETYIRSGTYSRKPLLPYTPGSDVAGVIEAVGDNASAFKKGDRVFTSSTISGGYAEYALAADHTVYKLPEKLDFKQGAAIGIPYFTAYRALIHSACVKAGESVLVHGASGGVGLAACQIARAYGLKILGTAGTEEGQKIVLQNGAHEVFNHREVNYIDKIKKYVGEKGIDIIIEMLANVNLSKDLSLLSHGGRVIVVGSRGTIEINPRDTMAKESSIIGVTLFSSTKEEFQQYAAALQAGMEIGWLKPVIGSQYPLEKVAEAHENIIHGSGATGKMILLL

SEQ ID NO: 285 - protein, 1233 aa, Homo Sapiens
MGFLKLIEIENFKSYKGRQIIGPFQRFTAIIGPNGSGKSNLMDAISFVLGEKTSNLRVKTLRDLIHGAPVGKPAANRAFVSMVYSEEGAEDRTFARVIVGGSSEYKINNKVVQLHEYSEELEKLGILIKARNFLVFQGAVESIAMKNPKERTALFEEISRSGELAQEYDKRKKEMVKAEEDTQFNYHRKKNIAAERKEAKQEKEEADRYQRLKDEVVRAQVQLQLFKLYHNEVEIEKLNKELASKNKEIEKDKKRMDKVEDELKEKKKELGKMMREQQQIEKEIKEKDSELNQKRPQYIKAKENTSHKIKKLEAAKKSLQNAQKHYKKRKGDMDELEKEMLSVEKARQEFEERMEEESQSQGRDLTLEENQVKKYHRLKEEASKRAATLAQELEKFNRDQKADQDRLDLEERKKVETEAKIKQKLREIEENQKRIEKLEEYITTSKQSLEEQKKLEGELTEEVEMAKRRIDEINKELNQVMEQLGDARIDRQESSRQQRKAEIMESIKRLYPGSVYGRLIDLCQPTQKKYQIAVTKVLGKNMDAIIVDSEKTGRDCIQYIKEQRGEPETFLPLDYLEVKPTDEKLRELKGAKLVIDVIRYEPPHIKKALQYACGNALVCDNVEDARRIAFGGHQRHKTVALDGTLFQKSGVISGGASDLKAKARRWDEKAVDKLKEKKERLTEELKEQMKAKRKEAELRQVQSQAHGLQMRLKYSQSDLEQTKTRHLALNLQEKSKLESELANFGPRINDIKRIIQSREREMKDLKEKMNQVEDEVFEEFCREIGVRNIREFEEEKVKRQNEIAKKRLEFENQKTRLGIQLDFEKNQLKEDQDKVHMWEQTVKKDENEIEKLKKEEQRHMKIIDETMAQLQDLKNQHLAKKSEVNDKNHEMEEIRKKLGGANKEMTHLQKEVTAIETKLEQKRSDRHNLLQACKMQDIKLPLSKGTMDDISQEEGSSQGEDSVSGSQRISSIYAREALIEIDYGDLCEDLKDAQAEEEIKQEMNTLQQKLNEQQSVLQRIAAPNMKAMEKLESVRDKFQETSDEFEAARKRAKKAKQAFEQIKKERFDRFNACFESVATNIDEIYKALSRNSSAQAFLGPENPEEPYLDGINYNCVAPGKRFRPMDNLSGGEKTVAALALLFAIHSYKPAPFFVLDEIDAALDNTNIGKVANYIKEQSTCNFQAIVISLKEEFYTKAESLIGVYPEQGDCVISKVLTFDLTKYPDANPNPNEQ

SEQ ID NO: 286 - protein, 780 aa, Homo Sapiens
MAAVDLEKLRASGAGKAIGVLTSGGDAQGMNAAVRAVTRMGIYVGAKVFLIYEGYEGLVEGGENIKQANWLSVSNIIQLGGTIIGSARCKAFTTREGRRAAAYNLVQHGITNLCVIGGDGSLTGANIFRSEWGSLLEELVAEGKISETTARTYSHLNIAGLVGSIDNDFCGTDMTIGTDSALHRIMEVIDAITTTAQSHQRTFVLEVMGRHCGYLALVSALASGADWLFIPEAPPEDGWENFMCERLGETRSRGSRLNIIIIAEGAIDRNGKPISSSYVKDLVVQRLGFDTRVTVLGHVQRGGTPSAFDRILSSKMGMEAVMALLEATPDTPACVVTLSGNQSVRLPLMECVQMTKEVQKAMDDKRFDEATQLRGGSFENNWNIYKLLAHQKPPKEKSNFSLAILNVGAPAAGMNAAVRSAVRTGISHGHTVYVVHDGFEGLAKGQVQEVGWHDVAGWLGRGGSMLGTKRTLPKGQLESIVENIRIYGIHALLVVGGFEAYEGVLQLVEARGRYEELCIVMCVIPATISNNVPGTDFSLGSDTAVNAAMESCDRIKQSASGTKRRVFIVETMGGYCGYLATVTGIAVGADAAYVFEDPFNIHDLKVNVEHMTEKMKTDIQRGLVLRNEKCHDYYTTEFLYNLYSSEGKGVFDCRTNVLGHLQQGGAPTPFDRNYGTKLGVKAMLWLSEKLREVYRKGRVFANAPDSACVIGLKKKAVAFSPVTELKKDTDFEHRMPREQWWLSLRLMLKMLAQYRISMAAYVSGELEHVTRRTLSMDKGF

SEQ ID NO: 287 - protein, 551 aa, Homo Sapiens
MPSETPQAEVGPTGCPHRSGPHSAKGSLEKGSPEDKEAKEPLWIRPDAPSRCTWQLGRPASESPHHHTAPAKSPKILPDILKKIGDTPMVRINKIGKKFGLKCELLAKCEFFNAGGSVKDRISLRMIEDAERDGTLKPGDTIIEPTSGNTGIGLALAAAVRGYRCIIVMPEKMSSEKVDVLRALGAEIVRTPTNARFDSPESHVGVAWRLKNEIPNSHILDQYRNASNPLAHYDTTADEILQQCDGKLDMLVASVGTGGTITGIARKLKEKCPGCRIIGVDPEGSILAEPEELNQTEQTTYEVEGIGYDFIPTVLDRTVVDKWFKSNDEEAFTFARMLIAQEGLLCGGSAGSTVAVAVKAAQELQEGQRCVVILPDSVRNYMTKFLSDRWMLQKGFLKEEDLTEKKPWWWHLRVQELGLSAPLTVLPTITCGHTIEILREKGFDQAPVVDEAGVILGMVTLGNMLSSLLAGKVQPSDQVGKVIYKQFKQIRLTDTLGRLSHILEMDHFALVVHEQIQYHSTGKSSQRQMVFGVVTAIDLLNFVAAQERDQK

SEQ ID NO: 288 - protein, 1224 aa, Homo Sapiens
MLTKFETKSARVKGLSFHPKRPWILTSLHNGVIQLWDYRMCTLIDKFDEHDGPVRGIDFHKQQPLFVSGGDDYKIKVWNYKLRRCLFTLLGHLDYIRTTFFHHEYPWILSASDDQTIRVWNWQSRTCVCVLTGHNHYVMCAQFHPTEDLVVSASLDQTVRVWDISGLRKKNLSPGAVESDVRGITGVDLFGTTDAVVKHVLEGHDRGVNWAAFHPTMPLIVSGADDRQVKIWRMNESKAWEVDTCRGHYNNVSCAVFHPRQELILSNSEDKSIRVWDMSKRTGVQTFRRDHDRFWVLAAHPNLNLFAAGHDGGMIVFKLERERPAYAVHGNMLHYVKDRFLRQLDFNSSKDVAVMQLRSGSKFPVFNMSYNPAENAVLLCTRASNLENSTYDLYTIPKDADSQNPDAPEGKRSSGLTAVWVARNRFAVLDRMHSLLIKNLKNEITKKVQVPNCDEIFYAGTGNLLLRDADSITLFDVQQKRTLASVKISKVKYVIWSADMSHVALLAKHAIVICNRKLDALCNIHENIRVKSGAWDESGVFIYTTSNHIKYAVTTGDHGIIRTLDLPIYVTRVKGNNVYCLDRECRPRVLTIDPTEFKFKLALINRKYDEVLHMVRNAKLVGQSIIAYLQKKGYPEVALHFVKDEKTRFSLALECGNIEIALEAAKALDDKNCWEKLGEVALLQGNHQIVEMCYQRTKNFDKLSFLYLITGNLEKLRKMMKIAEIRKDMSGHYQNALYLGDVSERVRILKNCGQKSLAYLTAATHGLDEEAESLKETFDPEKETIPDIDPNAKLLQPPAPIMPLDTNWPLLTVSKGFFEGTIASKGKGGALAADIDIDTVGTEGWGEDAELQLDEDGFVEATEGLGDDALGKGQEEGGGWDVEEDLELPPELDISPGAAGGAEDGFFVPPTKGTSPTQIWCNNSQLPVDHILAGSFETAMRLLHDQVGVIQFGPYKQLFLQTYARGRTTYQALPCLPSMYGYPNRNWKDAGLKNGVPAVGLKLNDLIQRLQLCYQLTTVGKFEEAVEKFRSILLSVPLLVVDNKQEIAEAQQLITICREYIVGLSVETERKKLPKETLEQQKRICEMAAYFTHSNLQPVHMILVLRTALNLFFKLKNFKTAATFARRLLELGPKPEVAQQTRKILSACEKNPTDAYQLNYDMHNPFDICAASYRPIYRGKPVEKCPLSGACYSPEFKGQICRVTTVTEIGKDVIGLRISPLQFR

SEQ ID NO: 289 - protein, 707 aa, Homo Sapiens
MSRDRFRSRGGGGGGFHRRGGGGGRGGLHDFRSPPPGMGLNQNRGPMGPGPGQSGPKPPIPPPPPHQQQQQPPPQQPPPQQPPPHQPPPHPQPHQQQQPPPPPQDSSKPVVAQGPGPAPGVGSAPPASSSAPPATPPTSGAPPGSGPGPTPTPPPAVTSAPPGAPPPTPPSSGVPTTPPQAGGPPPPPAAVPGPGPGPKQGPGPGGPKGGKMPGGPKPGGGPGLSTPGGHPKPPHRGGGEPRGGRQHHPPYHQQHHQGPPPGGPGGRSEEKISDSEGFKANLSLLRRPGEKTYTQRCRLFVGNLPADITEDEFKRLFAKYGEPGEVFINKGKGFGFIKLESRALAEIAKAELDDTPMRGRQLRVRFATHAAALSVRNLSPYVSNELLEEAFSQFGPIERAVVIVDDRGRSTGKGIVEFASKPAARKAFERCSEGVFLLTTTPRPVIVEPLEQLDDEDGLPEKLAQKNPMYQKERETPPRFAQHGTFEYEYSQRWKSLDEMEKQQREQVEKNMKDAKDKLESEMEDAYHEHQANLLRQDLMRRQEELRRMEELHNQEMQKRKEMQLRQEEERRRREEEMMIRQREMEEQMRRQREESYSRMGYMDPRERDMRMGGGGAMNMGDPYGSGGQKFPPLGGGGGIGYEANPGVPPATMSGSMMGSDMRTERFGQGGAGPVGGQGPRGMGPGTPAGYGRGREEYEGPNKKPRF

SEQ ID NO: 290 - protein, 165 aa, Homo Sapiens
MASGVQVADEVCRIFYDMKVRKCSTPEEIKKRKKAVIFCLSADKKCIIVEEGKEILVGDVGVTITDPFKHFVGMLPEKDCRYALYDASFETKESRKEELMFFLWAPELAPLKSKMIYASSKDAIKKKFQGIKHECQANGPEDLNRACIAEKLGGSLIVAFEGCPV

SEQ ID NO: 291 - protein, 153 aa, Homo Sapiens
MAELPHRIIKETQRLLAEPVPGIKAEPDESNARYFHVVIAGESKDSPFEGGTFKRELLLAEEYPMAAPKVRFMTKIYHPNVDKLERISLDILKDKWSPALQIRTVLLSIQALLNAPNPDDPLANDVVEQWKTNEAQAIETARAWTRLYAMNSI

SEQ ID NO: 292 - protein, 968 aa, Homo Sapiens
MDSTLTASEIRQRFIDFFKRNEHTYVHSSATIPLDDPTLLFANAGMNQFKPIFLNTIDPSHPMAKLSRAANTQKCIRAGGKHNDLDDVGKDVYHHTFFEMLGSWSFGDYFKELACKMALELLTQEFGIPIERLYVTYFGGDEAAGLEADLECKQIWQNLGLDDTKILPGNMKDNFWEMGDTGPCGPCSEIHYDRIGGRDAAHLVNQDDPNVLEIWNLVFIQYNREADGILKPLPKKSIDTGMGLERLVSVLQNKMSNYDTDLFVPYFEAIQKGTGARPYTGKVGAEDADGIDMAYRVLADHARTITVALADGGRPDNTGRGYVLRRILRRAVRYAHEKLNASRGFFATLVDVVVQSLGDAFPELKKDPDMVKDIINEEEVQFLKTLSRGRRILDRKIQSLGDSKTIPGDTAWLLYDTYGFPVDLTGLIAEEKGLVVDMDGFEEERKLAQLKSQGKGAGGEDLIMLDIYAIEELRARGLEVTDDSPKYNYHLDSSGSYVFENTVATVMALRREKMFVEEVSTGQECGVVLDKTCFYAEQGGQIYDEGYLVKVDDSSEDKTEFTVKNAQVRGGYVLHIGTIYGDLKVGDQVWLFIDEPRRRPIMSNHTATHILNFALRSVLGEADQKGSLVAPDRLRFDFTAKGAMSTQQIKKAEEIANEMIEAAKAVYTQDCPLAAAKAIQGLRAVFDETYPDPVRVVSIGVPVSELLDDPSGPAGSLTSVEFCGGTHLRNSSHAGAFVIVTEEAIAKGIRRIVAVTGAEAQKALRKAESLKKCLSVMEAKVKAQTAPNKDVQREIADLGEALATAVIPQWQKDELRETLKSLKKVMDDLDRASKADVQKRVLEKTKQFIDSNPNQPLVILEMESGASAKALNEALKLFKMHSPQTSAMLFTVDNEAGKITCLCQVPQNAANRGLKASEWVQQVSGLMDGKGGGKDVSAQATGKNVGCLQEALQLATSFAQLRLGDVKN

SEQ ID NO: 293 - protein, 354 aa, Homo Sapiens
MGKLVALVLLGVGLSLVGEMFLAFRERVNASREVEPVEPENCHLIEELESGSEDIDILPSGLAFISSGLKYPGMPNFAPDEPGKIFLMDLNEQNPRAQALEISGGFDKELFNPHGISIFIDKDNTVYLYVVNHPHMKSTVEIFKFEEQQRSLVYLKTIKHELLKSVNDIVVLGPEQFYATRDHYFTNSLLSFFEMILDLRWTYVLFYSPREVKVVAKGFCSANGITVSADQKYVYVADVAAKNIHIMEKHDNWDLTQLKVIQLGTLVDNLTVDPATGDILAGCHPNPMKLLNYNPEDPPGSEVLRIQNVLSEKPRVSTVYANNGSVLQGTSVASVYHGKILIGTVFHKTLYCEL

SEQ ID NO: 294 - protein, 741 aa, Homo Sapiens
MRIRGSSGTLSRINMLRIPVRKALVGLSKSPKGCVRTTATAASNLIEVFVDGQSVMVEPGTTVLQACEKVGMQIPRFCYHERLSVAGNCRMCLVEIEKAPKVVAACAMPVMKGWNILTNSEKSKKAREGVMEFLLANHPLDCPICDQGGECDLQDQSMMFGNDRSRFLEGKRAVEDKNIGPLVKTIMTRCIQCTRCIRFASEIAGVDDLGTTGRGNDMQVGTYIEKMFMSELSGNIIDICPVGALTSKPYAFTARPWETRKTESIDVMDAVGSNIVVSTRTGEVMRILPRMHEDINEEWISDKTRFAYDGLKRQRLTEPMVRNEKGLLTYTSWEDALSRVAGMLQSFQGKDVAAIAGGLVDAEALVALKDLLNRVDSDTLCTEEVFPTAGAGTDLRSNYLLNTTIAGVEEADVVLLVGTNPRFEAPLFNARIRKSWLHNDLKVALIGSPVDLTYTYDHLGDSPKILQDIASGSHPFSQVLKEAKKPMVVLGSSALQRNDGAAILAAVSSIAQKIRMTSGVTGDWKVMNILHRIASQVAALDLGYKPGVEAIRKNPPKVLFLLGADGGCITRQDLPKDCFIIYQGHHGDVGAPIADVILPGAAYTEKSATYVNTEGRAQQTKVAVTPPGLAREDWKIIRALSEIAGMTLPYDTLDQVRNRLEEVSPNLVRYDDIEGANYFQQANELSKLVNQQLLADPLVPPQLTIKDFYMTDSISRASQTMAKCVKAVTEGAQAVEEPSIC

SEQ ID NO: 295 - protein, 285 aa, Homo Sapiens
MAGLGHPAAFGRATHAVVRALPESLGQHALRSAKGEEVDVARAERQHQLYVGVLGSKLGLQVVELPADESLPDCVFVEDVAVVCEETALITRPGAPSRRKEVDMMKEALEKLQLNIVEMKDENATLDGGDVLFTGREFFVGLSKRTNQRGAEILADTFKDYAVSTVPVADGLHLKSFCSMAGPNLIAIGSSESAQKALKIMQQMSDHRYDKLTVPDDIAANCIYLNIPNKGHVLLHRTPEEYPESAKVYEKLKDHMLIPVSMSELEKVDGLLTCCSVLINKKVDS

SEQ ID NO: 296 - protein, 488 aa, Homo Sapiens
MSYPGYPPTGYPPFPGYPPAGQESSFPPSGQYPYPSGFPPMGGGAYPQVPSSGYPGAGGYPAPGGYPAPGGYPGAPQPGGAPSYPGVPPGQGFGVPPGGAGFSGYPQPPSQSYGGGPAQVPLPGGFPGGQMPSQYPGGQPTYPSQINTDSFSSYPVFSPVSLDYSSEPATVTQVTQGTIRPAANFDAIRDAEILRKAMKGFGTDEQAIVDVVANRSNDQRQKIKAAFKTSYGKDLIKDLKSELSGNMEELILALFMPPTYYDAWSLRKAMQGAGTQERVLIEILCTRTNQEIREIVRCYQSEFGRDLEKDIRSDTSGHFERLLVSMCQGNRDENQSINHQMAQEDAQRLYQAGEGRLGTDESCFNMILATRSFPQLRATMEAYSRMANRDLLSSVSREFSGYVESGLKTILQCALNRPAFFAERLYYAMKGAGTDDSTLVRIVVTRSEIDLVQIKQMFAQMYQKTLGTMIAGDTSGDYRRLLLAIVGQ

SEQ ID NO: 297 - protein, 261 aa, Homo Sapiens
MLRVLCLLRPWRPLRARGCASDGAAGGSEIQVRALAGPDQGITEILMNRPSARNALGNVFVSELLETLAQLREDRQVRVLLFRSGVKGVFCAGADLKEREQMSEAEVGVFVQRLRGLMNDIASSAVMGLIETTRGLLPGAGGTQRLPRCLGVALAKELIFTGRRLSGTEAHVLGLVNHAVAQNEEGDAAYQRARALAQEILPQAPIAVRLGKVAIDRGTEVDIASGMAIEGMCYAQNIPTRDRLEGMAAFREKRTPKFVGK

SEQ ID NO: 298 - protein, 227 aa, Homo Sapiens
MGASARLLRAVIMGAPGSGKGTVSSRITTHFELKHLSSGDLLRDNMLRGTEIGVLAKAFIDQGKLIPDDVMTRLALHELKNLTQYSWLLDGFPRTLPQAEALDRAYQIDTVINLNVPFEVIKQRLTARWIHPASGRVYNIEFNPPKTVGIDDLTGEPLIQREDDKPETVIKRLKAYEDQTKPVLEYYQKKGVLETFSGTETNKIWPYVYAFLQTKVPQRSQKASVTP

SEQ ID NO: 299 - protein, 293 aa, Homo Sapiens [sequence omitted]

SEQ ID NO: 300 - protein, 728 aa, Homo Sapiens
MAGFWVGTAPLVAAGRRGRWPPQQLMLSAALRTLKHVLYYSRQCLMVSRNLGSVGYDPNEKTFDKILVANRGEIACRVIRTCKKMGIKTVAIHSDVDASSVHVKMADEAVCVGPAPTSKSYLNMDAIMEAIKKTRAQAVHPGYGFLSENKEFARCLAAEDVVFIGPDTHAIQAMGDKIESKLLAKKAEVNTIPGFDGVVKDAEEAVRIAREIGYPVMIKASAGGGGKGMRIAWDDEETRDGFRLSSQEAASSFGDDRLLIEKFIDNPRHIEIQVLGDKHGNALWLNERECSIQRRNQKVVEEAPSIFLDAETRRAMGEQAVALARAVKYSSAGTVEFLVDSKKNFYFLEMNTRLQVEHPVTECITGLDLVQEMIRVAKGYPLRHKQADIRINGWAVECRVYAEDPYKSFGLPSIGRLSQYQEPLHLPGVRVDSGIQPGSDISIYYDPMISKLITYGSDRTEALKRMADALDNYVIRGVTHNIALLREVIINSRFVKGDISTKFLSDVYPDGFKGHMLTKSEKNQLLAIASSLFVAFQLRAQHFQENSRMPVIKPDIANWELSVKLHDKVHTVVASNNGSVFSVEVDGSKLNVTSTWNLASPLLSVSVDGTQRTVQCLSREAGGNMSIQFLGTVYKVNILTRLAAELNKFMLEKVTEDTSSVLRSPMPGVVVAVSVKPGDAVAEGQEICVIEAMKMQNSMTAGKTGTVKSVHCQAGDTVGEGDLLVELE

SEQ ID NO: 301 - protein, 623 aa, Homo Sapiens
MTAQSRSPTTPTFPGPSQRTPLTPCPVQTPRLGKALIHCWTDPGQPLGEQQRVRRQRTETSEPTMRLHRLRARLSAVACGLLLLLVRGQGQDSASPIRTTHTGQVLGSLVHVKGANAGVQTFLGIPFAKPPLGPLRFAPPEPPESWSGVRDGTTHPAMCLQDLTAVESEFLSQFNMTFPSDSMSEDCLYLSIYTPAHSHEGSNLPVMVWIHGGALVFGMASLYDGSMLAALENVVVVIIQYRLGVLGFFSTGDKHATGNWGYLDQVAALRWVQQNIAHFGGNPDRVTIFGESAGGTSVSSLVVSPISQGLFHGAIMESGVALLPGLIASSADVISTVVANLSACDQVDSEALVGCLRGKSKEEILAINKPFKMIPGVVDGVFLPRHPQELLASADFQPVPSIVGVNNNEFGWLIPKVMRIYDTQKEMDREASQAALQKMLTLLMLPPTFGDLLREEYIGDNGDPQTLQAQFQEMMADSMFVIPALQVAHFQCSRAPVYFYEFQHQPSWLKNIRPPHMKADHGDELPFVFRSFFGGNYIKFTEEEEQLSRKMMKYWANFARNGNPNGEGLPHWPLFDQEEQYLQLNLQPAVGRALKAHRLQFWKKALPQKIQELEEPEERHTEL

SEQ ID NO: 302 - protein, 259 aa, Homo Sapiens
MAPNIYLVRQRISRLGQRMSGFQINLNPLKEPLGFIKVLEWIASIFAFATCGGFKGQTEIQVNCPPAVTENKTVTATFGYPFRLNEASFQPPPGVNICDVNWKDYVLIGDYSSSAQFYVTFAVFVFLYCIAALLLYVGYTSLYLDSRKLPMIDFVVTLVATFLWLVSTSAWAKALTDIKIATGHNIIDELPPCKKKAVLCYFGSVTSMGSLNVSVIFGFLNMILWGGNAWFVYKETSLHSPSNTSAPHSQGGIPPPTGI

SEQ ID NO: 303 - protein, 292 aa, Homo Sapiens
MLGAWAVEGTAVALLRLLLLLLPPAIRGPGLGVAGVAGAAGAGLPESVIWAVNAGGEAHVDVHGIHFRKDPLEGRVGRASDYGMKLPILRSNPEDQILYQTERYNEETFGYEVPIKEEGDYVLVLKFAEVYFAQSQQKVFDVRLNGHVVVKDLDIFDRVGHSTAHDEIIPMSIRKGKLSVQGEVSTFTGKLYIEFVKGYYDNPKVCALYIMAGTVDDVPKLQPHPGLEKKEEEEEEEEYDEGSNLKKQTNKNRVQSGPRTPNPYASDNSSLMFPILVAFGVFIPTLFCLCRL

SEQ ID NO: 304 - protein, 345 aa, Homo Sapiens
MISPVLILFSSFLCHVAIAGRTCPKPDDLPFSTVVPLKTFYEPGEEITYSCKPGYVSRGGMRKFICPLTGLWPINTLKCTPRVCPFAGILENGAVRYTTFEYPNTISFSCNTGFYLNGADSAKCTEEGKWSPELPVCAPIICPPPSIPTFATLRVYKPSAGNNSLYRDTAVFECLPQHAMFGNDTITCTTHGNWTKLPECREVKCPFPSRPDNGFVNYPAKPTLYYKDKATFGCHDGYSLDGPEEIECTKLGNWSAMPSCKASCKVPVKKATVVYQGERVKIQEKFKNGMLHGDKVSFFCKNKEKKCSYTEDAQCIDGTIEVPKCFKEHSSLAFWKTDASDVKPC

SEQ ID NO: 305 - protein, 1192 aa, Homo Sapiens
MEDLDQSPLVSSSDSPPRPQPAFKYQFVREPEDEEEEEEEEEEDEDEDLEELEVLERKPAAGLSAAPVPTAPAAGAPLMDFGNDFVPPAPRGPLPAAPPVAPERQPSWDPSPVSSTVPAPSPLSAAAVSPSKLPEDDEPPARPPPPPPASVSPQAEPVWTPPAPAPAAPPSTPAAPKRRGSSGSVDETLFALPAASEPVIRSSAENMDLKEQPGNTISAGQEDFPSVLLETAASLPSLSPLSAASFKEHEYLGNLSTVLPTEGTLQENVSEASKEVSEKAKTLLIDRDLTEFSELEYSEMGSSFSVSPKAESAVIVANPREEIIVKNKDEEEKLVSNNILHNQQELPTALTKLVKEDEVVSSEKAKDSFNEKRVAVEAPMREEYADFKPFERVWEVKDSKEDSDMLAAGGKIESNLESKVDKKCFADSLEQTNHEKDSESSNDDTSFPSTPEGIKDRSGAYITCAPFNPAATESIATNIFPLLGDPTSENKTDEKKIEEKKAQIVTEKNTSTKTSNPFLVAAQDSETDYVTTDNLTKVTEEVVANMPEGLTPDLVQEACESELNEVTGTKIAYETKMDLVQTSEVMQESLYPAAQLCPSFEESEATPSPVLPDIVMEAPLNSAVPSAGASVIQPSSSPLEASSVNYESIKHEPENPPPYEEAMSVSLKKVSGIKEEIKEPENINAALQETEAPYISIACDLIKETKLSAEPAPDFSDYSEMAKVEQPVPDHSELVEDSSPDSEPVDLFSDDSIPDVPQKQDETVMLVKESLTETSFESMIEYENKEKLSALPPEGGKPYLESFKLSLDNTKDTLLPDEVSTLSKKEKIPLQMEELSTAVYSNDDLFISKEAQIRETETFSDSSPIEIIDEFPTLISSKTDSFSKLAREYTDLEVSHKSEIANAPDGAGSLPCTELPHDLSLKNIQPKVEEKISFSDDFSKNGSATSKVLLLPPDVSALATQAEIESIVKPKVLVKEAEKKLPSDTEKEDRSPSAIFSAELSKTSVVDLLYWRDIKKTGVVFGASLFLLLSLTVFSIVSVTAYIALALLSVTISFRIYKGVIQAIQKSDEGHPFRAYLESEVAISEELVQKYSNSALGHVNCTIKELRRLFLVDDLVDSLKFAVLMWVFTYVGALFNGLTLLILALISLFSVPVIYERHQAQIDHYLGLANKNVKDAMAKIQAKIPGLKRKAE

SEQ ID NO: 306 - protein, 868 aa, Homo Sapiens
MATFISVQLKKTSEVDLAKPLVKFIQQTYPSGGEEQAQYCRAAEELSKLRRAAVGRPLDKHEGALETLLRYYDQICSIEPKFPFSENQICLTFTWKDAFDKGSLFGGSVKLALASLGYEKSCVLFNCAALASQIAAEQNLDNDEGLKIAAKHYQFASGAFLHIKETVLSALSREPTVDISPDTVGTLSLIMLAQAQEVFFLKATRDKMKDAIIAKLANQAADYFGDAFKQCQYKDTLPKEVFPVLAAKHCIMQANAEYHQSILAKQQKKFGEEIARLQHAAELIKTVASRYDEYVNVKDFSDKINRALAAAKKDNDFIYHDRVPDLKDLDPIGKATLVKSTPVNVPISQKFTDLFEKMVPVSVQQSLAAYNQRKADLVNRSIAQMREATTLANGVLASLNLPAAIEDVSGDTVPQSILTKSRSVIEQGGIQTVDQLIKELPELLQRNREILDESLRLLDEEEATDNDLRAKFKERWQRTPSNELYKPLRAEGTNFRTVLDKAVQADGQVKECYQSHRDTIVLLCKPEPELNAAIPSANPAKTMQGSEVVNVLKSLLSNLDEVKKEREGLENDLKSVNFDMTSKFLTALAQDGVINEEALSVTELDRVYGGLTTKVQESLKKQEGLLKNIQVSHQEFSKMKQSNNEANLREEVLKNLATAYDNFVELVANLKEGTKFYNELTEILVRFQNKCSDIVFARKTERDELLKDLQQSIAREPSAPSIPTPAYQSSPAGGHAPTPPTPAPRTMPPTKPQPPARPPPPVLPANRAPSATAPSPVGAGTAAPAPSQTPGSAPPPQAQGPPYPTYPGYPGYCQMPMPMGYNPYAYGQYNMPYPPVYHQSPGQAPYPGPQQPSYPFPQPPQQSYYPQQ

SEQ ID NO: 307 - protein, 302 aa, Homo Sapiens
MALVASVRVPARVLLRAGARLPGAALGRTERAAGGGDGARRFGSQRVLVEPDAGAGVAVMKFKNPPVNSLSLEFLTELVISLEKLENDKSFRGVILTSDRPGVFSAGLDLTEMCGRSPAHYAGYWKAVQELWLRLYQSNLVLVSAINGACPAGGCLVALTCDYRILADNPRYCIGLNETQLGIIAPFWLKDTLENTIGHRAAERALQLGLLFPPAEALQVGIVDQVVPEEQVQSTALSAIAQWMAIPDHARQLTKAMMRKATASRLVTQRDADVQNFVSFISKDSIQKSLQMYLERLKEEKG

SEQ ID NO: 308 - protein, 240 aa, Homo Sapiens
MSRSNRQKEYKCGDLVFAKMKGYPHWPARIDEMPEAAVKSTANKYQVFFFGTHETAFLGPKDLFPYEESKEKFGKPNKRKGFSEGLWEIENNPTVKASGYQSSQKKSCVEEPEPEPEAAEGDGDKKGNAEGSSDEEGKLVIDEPAKEKNEKGALKRRAGDLLEDSPKRPKEAENPEGEEKEAATLEVERPLPMEVEKNSTPSEPGSGRGPPQEEEEEEDEEEEATKEDAEAPGIRDHESL

SEQ ID NO: 309 - protein, 563 aa, Homo Sapiens
MLGLSKVPLTQATRGPQVQQPPPSNRFLQPVQKIDMNLTDLLGELQRDPWPVPQGKRPLRSSGVALSIAVGLLECTFPNTGARIMMFIGGPATQGPGMVVGDELKTPIRSWHDIDKDNAKYVKKGTKHFEALANRAATTGHVIDIYACALDQTGLLEMKCCPNLTGGYMVMGDSFNTSLFKQTFQRVFTKDMHGQFKMGFGGTLEIKTSREIKISGAIGPCVSLNSKGPCVSENEIGTGGTCQWKICGLSPTTTLAIYFEVVNQHNAPIPQGGRGAIQFVTQYQHSSGQRRIRVTTIARNWADAQTQIQNIAASFDQEAAAILMARLAIYRAETEEGPDVLRWLDRQLIRLCQKFGEYHKDDPSSFRFSETFSLYPQFMFHLRRSSFLQVFNNSPDESSYYRHHFMRQDLTQSLIMIQPILYAYSFSGPPEPVLLDSSSILADRILLMDTFFQILIYHGETIAQWRKSGYQDMPEYENFRHLLQAPVDDAQEILHSRFPMPRYIDTEHGGSQARFLLSKVNPSQTHNNMYAWGQESGAPILTDDVSLQVFMDHLKKLAVSSAA

SEQ ID NO: 310 - protein, 543 aa, Homo Sapiens
MMPTPVILLKEGTDSSQGIPQLVSNISACQVIAEAVRTTLGPRGMDKLIVDGRGKATISNDGATILKLLDVVHPAAKTLVDIAKSQDAEVGDGTTSVTLLAAEFLKQVKPYVEEGLHPQIIIRAFRTATQLAVNKIKEIAVTVKKADKVEQRKLLEKCAMTALSSKLISQQKAFFAKMVVDAVMMLDDLLQLKMIGIKKVQGGALEDSQLVAGVAFKKTFSYAGFEMQPKKYHNPKIALLNVELELKAEKDNAEIRVHTVEDYQAIVDAEWNILYDKLEKIHHSGAKVVLSKLPIGDVATQYFADRDMFCAGRVPEEDLKRTMMACGGSIQTSVNALSADVLGRCQVFEETQIGGERYNFFTGCPKAKTCTFILRGGAEQFMEETERSLHDAIMIVRRAIKNDSVVAGGGAIEMELSKYLRDYSRTIPGKQQLLIGAYAKALEIIPRQLCDNAGFDATNILNKLRARHAQGGTWYGVDINNEDIADNFEAFVWEPAMVRINALTAASEAACLIVSVDETIKNPRSTVDAPTAAGRGRGRGRPH

SEQ ID NO: 311 - protein, 217 aa, Homo Sapiens
MSSKVSRDTLYEAVREVLHGNQRKRRKFLETVELQISLKNYDPQKDKRFSGTVRLKSTPRPKFSVCVLGDQQHCDEAKAVDIPHMDIEALKKLNKNKKLVKKLAKKYDAFLASESLIKQIPRILGPGLNKAGKFPSLLTHNENMVAKVDEVKSTIKFQMKKVLCLAVAVGHVKMTDDELVYNIHLAVNFLVSLLKKNWQNVRALYIKSTMGKPQRLY

SEQ ID NO: 312 - protein, 452 aa, Homo Sapiens
MAGYLRVVRSLCRASGSRPAWAPAALTAPTSQEQPRRHYADKRIKVAKPVVEMDGDEMTRIIWQFIKEKLILPHVDIQLKYFDLGLPNRDQTDDQVTIDSALATQKYSVAVKCATITPDEARVEEFKLKKMWKSPNGTIRNILGGTVFREPIICKNIPRLVPGWTKPITIGRHAHGDQYKATDFVADRAGTFKMVFTPKDGSGVKEWEVYNFPAGGVGMGMYNTDESISGFAHSCFQYAIQKKWPLYMSTKNTILKAYDGRFKDIFQEIFDKHYKTDFDKNKIWYEHRLIDDMVAQVLKSSGGFVWACKNYDGDVQSDILAQGFGSLGLMTSVLVCPDGKTIEAEAAHGTVTRHYREHQKGRPTSTNPIASIFAWTRGLEHRGKLDGNQDLIRFAQMLEKVCVETVESGAMTKDLAGCIHGLSNVKLNEHFLNTTDFLDTIKSNLDRALGRQ

SEQ ID NO: 313 - protein, 419 aa, Homo Sapiens
MPLSRWLRSVGVFLLPAPYWAPRERWLGSLRRPSLVHGYPVLAWHSARCWCQAWTEEPRALCSSLRMNGDQNSDVYAQEKQDFVQHFSQIVRVLTEDEMGHPEIGDAIARLKEVLEYNAIGGKYNRGLTVVVAFRELVEPRKQDADSLQRAWTVGWCVELLQAFFLVADDIMDSSLTRRGQICWYQKPGVGLDAINDANLLEACIYRLLKLYCREQPYYLNLIELFLQSSYQTEIGQTLDLLTAPQGNVDLVRFTEKRYKSIVKYKTAFYSFYLPIAAAMYMAGIDGEKEHANAKKILLEMGEFFQIQDDYLDLFGDPSVTGKIGTDIQDNKCSWLVVQCLQRATPEQYQILKENYGQKEAEKVARVKALYEELDLPAVFLQYEEDSYSHIMALIEQYAAPLPPAVFLGLARKIYKRRK

SEQ ID NO: 314 - protein, 182 aa, Homo Sapiens
MKGWGWLALLLGALLGTAWARRSQDLHCGACRALVDELEWEIAQVDPKKTIQMGSFRINPDGSQSVVEVPYARSEAHLTELLEEICDRMKEYGEQIDPSTHRKNYVRVVGRNGESSELDLQGIRIDSDISGTLKFACESIVEEYEDELIEFFSREADNVKDKLCSKRTDLCDHALHISHDEL

SEQ ID NO: 315 - protein, 1519 aa, Homo Sapiens
MAPYPCGCHILLLLFCCLAAARANLLNLNWLWFNNEDTSHAATTIPEPQGPLPVQPTADTTTHVTPRNGSTEPATAPGSPEPPSELLEDGQDTPTSAESPDAPEENIAGVGAEILNVAKGIRSFVQLWNDTVPTESLARAETLVLETPVGPLALAGPSSTPQENGTTLWPSRGIPSSPGAHTTEAGTLPAPTPSPPSLGRPWAPLTGPSVPPPSSERISEEVGLLQLLGDPPPQQVTQTDDPDVGLAYVFGPDANSGQVARYHFPSLFFRDFSLLFHIRPATEGPGVLFAITDSAQAMVLLGVKLSGVQDGHQDISLLYTEPGAGQTHTAASFRLPAFVGQWTHLALSVAGGFVALYVDCEEFQRMPLARSSRGLELEPGAGLFVAQAGGADPDKFQGVIAELKVRRDPQVSPMHCLDEEGDDSDGASGDSGSGLGDARELLREETGAALKPRLPAPPPVTTPPLAGGSSTEDSRSEEVEEQTTVASLGAQTLPGSDSVSTWDGSVRTPGGRVKEGGLKGQKGEPGVPGPPGRAGPPGSPCLPGPPGLPCPVSPLGPAGPALQTVPGPQGPPGPPGRDGTPGRDGEPGDPGEDGKPGDTGPQGFPGTPGDVGPKGDKGDPGVGERGPPGPQGPPGPPGPSFRHDKLTFIDMEGSGFGGDLEALRGPRGFPGPPGPPGVPGLPGEPGRFGVNSSDVPGPAGLPGVPGREGPPGFPGLPGPPGPPGREGPPGRTGQKGSLGEAGAPGHKGSKGAPGPAGARGESGLAGAPGPAGPPGPPGPPGPPGPGLPAGFDDMEGSGGPFWSTARSADGPQGPPGLPGLKGDPGVPGLPGAKGEVGADGVPGFPGLPGREGIAGPQGPKGDRGSRGEKGDPGKDGVGQPGLPGPPGPPGPVVYVSEQDGSVLSVPGPEGRPGFAGFPGPAGPKGNLGSKGERGSPGPKGEKGEPGSIFSPDGGALGPAQKGAKGEPGFRGPPGPYGRPGYKGEIGFPGRPGRPGMNGLKGEKGEPGDASLGFGMRGMPGPPGPPGPPGPPGTPVYDSNVFAESSRPGPPGLPGNQGPPGPKGAKGEVGPPGPPGQFPFDFLQLEAEMKGEKGDRGDAGQKGERGEPGGGGFFGSSLPGPPGPPGPPGPRGYPGIPGPKGESIRGQPGPPGPQGPPGIGYEGRQGPPGPPGPPGPPSFPGPHRQTISVPGPPGPPGPPGPPGTMGASSGVRLWATRQAMLGQVHEVPEGWLIFVAEQEELYVRVQNGFRKVQLEARTPLPRGTDNEVAALQPPVVQLHDSNPYPRREHPHPTARPWRADDILASPPRLPEPQPYPGAPHHSSYVHLRPARPTSPPAHSHRDFQPVLHLVALNSPLSGGMRGIRGADFQCFQQARAVGLAGTFRAFLSSRLQDLYSIVRRADRAAVPIVNLKDELLFPSWEALFSGSEGPLKPGARIFSFDGKDVLRHPTWPQKSVWHGSDPNGRRLTESYCETWRTEAPSATGQASSLLGGRLLGQSAASCHHAYIVLCIENSFMTASK

SEQ ID NO: 316 - protein, 1106 aa, Homo Sapiens
MKLKEVDRTAMQAWSPAQNHPIYLATGTSAQQLDATFSTNASLEIFELDLSDPSLDMKSCATFSSSHRYHKLIWGPYKMDSKGDVSGVLIAGGENGNIILYDPSKIIAGDKEVVIAQNDKHTGPVRALDVNIFQTNLVASGANESEIYIWDLNNFATPMTPGAKTQPPEDISCIAWNRQVQHILASASPSGRATVWDLRKNEPIIKVSDHSNRMHCSGLAWHPDVATQMVLASEDDRLPVIQMWDLRFASSPLRVLENHARGILAIAWSMADPELLLSCGKDAKILCSNPNTGEVLYELPTNTQWCFDIQWCPRNPAVLSAASFDGRISVYSIMGGSTDGLRQKQVDKLSSSFGNLDPFGTGQPLPPLQIPQQTAQHSIVLPLKKPPKWIRRPVGASFSFGGKLVTFENVRMPSHQGAEQQQQQHHVFISQVVTEKEFLSRSDQLQQAVQSQGFINYCQKKIDASQTEFEKNVWSFLKVNFEDDSRGKYLELLGYRKEDLGKKIALALNKVDGANVALKDSDQVAQSDGEESPAAEEQLLGEHIKEEKEESEFLPSSGGTFNISVSGDIDGLITQALLTGNFESAVDLCLHDNRMADAIILAIAGGQELLARTQKKYFAKSQSKITRLITAVVMKNWKEIVESCDLKNWREALAAVLTYAKPDEFSALCDLLGTRLENEGDSLLQTQACLCYICAGNVEKLVACWTKAQDGSHPLSLQDLIEKVVILRKAVQLTQAMDTSTVGVLLAAKMSQYANLLAAQGSIAAALAFLPDNTNQPNIMQLRDRLCRAQGEPVAGHESPKIPYEKQQLPKGRPGPVAGHHQMPRVQTQQYYPHGENPPPPGFIMHGNVNPNAAGQLPTSPGHMHTQVPPYPQPQRPQNGWNDPPALNRVPKKKKMPENFMPPVPITSPIMNPLGDPQSQMLQQQPSAPVPLSSQSSFPQPHLPGGQPFHGVQQPLGQTGMPPSFSKPNIEGAPGAPIGNTFQHVQSLPTKKITKKPIPDEHLILKTTFEDLIQRCLSSATDPQTKRKLDDASKRLEFLYDKLREQTLSPTITSGLHNIARSIETRNYSEGLTMHTHIVSTSNFSETSAFMPVLKVVLTQANKLGV

SEQ ID NO: 317 - protein, 224 aa, Homo Sapiens
MAAAVPQRAWTVEQLRSEQLPKKDIIKFLQEHGSDSFLAEHKLLGNIKNVAKTANKDHLVTAYNHLFETKRFKGTESISKVSEQVKNVKLNEDKPKETKSEETLDEGPPKYTKSVLKKGDKTNFPKKGDVVHCWYTGTLQDGTVFDTNIQTSAKKKKNAKPLSFKVGVGKVIRGWDEALLTMSKGEKARLEIEPEWAYGKKGQPDAKIPPNAKLTFEVELVDID

SEQ ID NO: 318 - protein, 2633 aa, Homo Sapiens
MPVTEKDLAEDAPWKKIQQNTFTRWCNEHLKCVNKRIGNLQTDLSDGLRLIALLEVLSQKRMYRKYHQRPTFRQMQLENVSVALEFLDRESIKLVSIDSKAIVDGNLKLILGLVWTLILHYSISMPVWEDEGDDDAKKQTPKQRLLGWIQNKIPYLPITNFNQNWQDGKALGALVDSCAPGLCPDWESWDPQKPVDNAREAMQQADDWLGVPQVITPEEIIHPDVDEHSVMTYLSQFPKAKLKPGAPLKPKLNPKKARAYGRGIEPTGNMVKQPAKFTVDTISAGQGDVMVFVEDPEGNKEEAQVTPDSDKNKTYSVEYLPKVTGLHKVTVLFAGQHISKSPFEVSVDKAQGDASKVTAKGPGLEAVGNIANKPTYFDIYTAGAGVGDIGVEVEDPQGKNTVELLVEDKGNQVYRCVYKPMQPGPHVVKIFFAGDTIPKSPFVVQVGEACNPNACRASGRGLQPKGVRIRETTDFKVDTKAAGSGELGVTMKGPKGLEELVKQKDFLDGVYAFEYYPSTPGRYSIAITWGGHHIPKSPFEVQVGPEAGMQKVRAWGPGLHGGIVGRSADFVVESIGSEVGSLGFAIEGPSQAKIEYNDQNDGSCDVKYWPKEPGEYAVHIMCDDEDIKDSPYMAFIHPATGGYNPDLVRAYGPGLEKSGCIVNNLAEFTVDPKDAGKAPLKIFAQDGEGQRIDIQMKNRMDGTYACSYTPVKAIKHTIAVVWGGVNIPHSPYRVNIGQGSHPQKVKVFGPGVERSGLKANEPTHFTVDCTEAGEGDVSVGIKCDARVLSEDEEDVDFDIIHNANDTFTVKYVPPAAGRYTIKVLFASQEIPASPFRVKVDPSHDASKVKAEGPGLSKAGVENGKPTHFTVYTKGAGKAPLNVQFNSPLPGDAVKDLDIIDNYDYSHTVKYTPTQQGNMQVLVTYGGDPIPKSPFTVGVAAPLDLSKIKLNGLENRVEVGKDQEFTVDTRGAGGQGKLDVTILSPSRKVVPCLVTPVTGRENSTAKFIPREEGLYAVDVTYDGHPVPGSPYTVEASLPPDPSKVKAHGPGLEGGLVGKPAEFTIDTKGAGTGGLGLTVEGPCEAKIECSDNGDGTCSVSYLPTKPGEYFVNILFEEVHIPGSPFKADIEMPFDPSKVVASGPGLEHGKVGEAGLLSVDCSEAGPGALGLEAVSDSGTKAEVSIQNNKDGTYAVTYVPLTAGMYTLTMKYGGELVPHFPARVKVEPAVDTSRIKVFGPGIEGKDVFREATTDFTVDSRPLTQVGGDHIKAHIANPSGASTECFVTDNADGTYQVEYTPFEKGLHVVEVTYDDVPIPNSPFKVAVTEGCQPSRVQAQGPGLKEAFTNKPNVFTVVTRGAGIGGLGITVEGPSESKINCRDNKDGSCSAEYIPFAPGDYDVNITYGGAHIPGSPFRVPVKDVVDPSKVKIAGPGLGSGVRARVLQSFTVDSSKAGLAPLEVRVLGPRADDTDSQSWRSPLKALSEFFKGDPKGDFNKTGLVEPVNVVDNGDGTHTVTYTPSQEGPYMVSVKYADEEIPRSPFKVKVLPTYDASKVTASGPGLSSYGVPASLPVDFAIDARDAGEGLLAVQITDQEGKPKRAIVHDNKDGTYAVTYIPDKTGRYMIGVTYGGDDIPLSPYRIRATQTGDASKCLATGPGIASTVKTGEEVGFVVDAKTAGKGKVTCTVLTPDGTEAEADVIENEDGTYDIFYTAAKPGTYVIYVRFGGVDIPNSPFTVMATDGEVTAVEEAPVNACPPGFRPWVTEEAYVPVSDMNGLGFKPFDLVIPFAVRKGEITGEVHMPSGKTATPEIVDNKDGTVTVRYAPTEVGLHEMHIKYMGSHIPESPLQFYVNYPNSGSVSAYGPGLVYGVANKTATFTIVTEDAGEGGLDLAIEGPSKAEISCIDNKDGTCTVTYLPTLPGDYSILVKYNDKHIPGSPFTAKITDDSRRCSQVKLGSAADFLLDISETDLSSLTASIKAPSGRDEPCLLKRLPNNHIGISFIPREVGEHLVSIKKNGNHVANSPVSIMVVQSEIGDARRAKVYGRGLSEGRTFEMSDFIVDTRDAGYGGISLAVEGPSKVDIQTEDLEDGTCKVSYFPTVPGVYIVSTKFADEHVPGSPFTVKISGEGRVKESITRTSRAPSVATVGSICDLNLKIPEINSSDMSAHVTSPSGRVTEAEIVPMGKNSHCVRFVPQEMGVHTVSVKYRGQHVTGSPFQFTVGPLGEGGAHKVRAGGPGLERGEAGVPAEFSIWTREAGAGGLSIAVEGPSKAEITFDDHKNGSCGVSYIAQEPGNYEVSIKFNDEHIPESPYLVPVIAPSDDARRLTVMSLQESGLKVNQPASFAIRLNGAKGKIDAKVHSPSGAVEECHVSELEPDKYAVRFIPHENGVHTIDVKFNGSHVVGSPFKVRVGEPGQAGNPALVSAYGTGLEGGTTGIQSEFFINTTRAGPGTLSVTIEGPSKVKMDCQETPEGYKVMYTPMAPGNYLISVKYGGPNHIVGSPFKAKVTGQRLVSPGSANETSSILVESVTRSSTETCYSAIPKASSDASKVTSKGAGLSKAFVGQKSSFLVDCSKAGSNMLLIGVHGPTTPCEEVSMKHVGNQQYNVTYVVKERGDYVLAVKWGEEHIPGSPFHVTVP

SEQ ID NO: 319 - protein, 315 aa, Homo Sapiens
MPGLSCRFYQHKFPEVEDVVMVNVRSIAEMGAYVSLLEYNNIEGMILLSELSRRRIRSINKLIRIGRNECVVVIRVDKEKGYIDLSKRRVSPEEAIKCEDKFTKSKTVYSILRHVAEVLEYTKDEQLESLFQRTAWVFDDKYKRPGYGAYDAFKHAVSDPSILDSLDLNEDEREVLINNINRRLTPQAVKIRADIEVACYGYEGIDAVKEALRAGLNCSTENMPIKINLIAPPRYVMTTTTLERTEGLSVLSQAMAVIKEKIEEKRGVFNVQMEPKVVTDTDETELARQMERLERENAEVDGDDDAEEMEAKAED

SEQ ID NO: 320 - protein, 658 aa, Homo Sapiens
MVPRLLLRAWPRGPAVGPGAPSRPLSAGSGPGQYLQRSIVPTMHYQDSLPRLPIPKLEDTIRRYLSAQKPLLNDGQFRKTEQFCKSFENGIGKELHEQLVALDKQNKHTSYISGPWFDMYLSARDSVVLNFNPFMAFNPDPKSEYNDQLTRATNMTVSAIRFLKTLRAGLLEPEVFHLNPAKSDTITFKRLIRFVPSSLSWYGAYLVNAYPLDMSQYFRLFNSTRLPKPSRDELFTDDKARHLLVLRKGNFYIFDVLDQDGNIVSPSEIQAHLKYILSDSSPAPEFPLAYLTSENRDIWAELRQKLMSSGNEESLRKVDSAVFCLCLDDFPIKDLVHLSHNMLHGDGTNRWFDKSFNLIIAKDGSTAVHFEHSWGDGVAVLRFFNEVFKDSTQTPAVTPQSQPATTDSTVTVQKLNFELTDALKTGITAAKEKFDATMKTLTIDCVQFQRGGKEFLKKQKLSPDAVAQLAFQMAFLRQYGQTVATYESCSTAAFKHGRTETIRPASVYTKRCSEAFVREPSRHSAGELQQMMVECSKYHGQLTKEAAMGQGFDRHLFALRHLAAAKGIILPELYLDPAYGQINHNVLSTSTLSSPAVNLGGFAPVVSDGFGVGYAVHDNWIGCNVSSYPGRNAREFLQCVEKALEDMFDALEGKSIKS

SEQ ID NO: 321 - protein, 552 aa, Homo Sapiens
MAECNLVAILISSIDNPLDKNLDNGGNSCLDFRPLNSFSQPQVLLAAAVCTKAGKAIVSRQFVEMTRTRIEGLLAAFPKLMNTGKQHTFVETESVRYVYQPMEKLYMVLITTKNSNILEDLETLRLFSRVIPEYCRALEENEISEHCFDLIFAFDEIVALGYRENVNLAQIRTFTEMDSHEEKVFRAVRETQEREAKAEMRRKAKELQQARRDAERQGKKAPGFGGFGSSAVSGGSTAAMITETIIETDKPKVAPAPARPSGPSKALKLGAKGKEVDNFVDKLKSEGETIMSSSMGKRTSEATKMHAPPINMESVHMKIEEKITLTCGRDGGLQNMELHGMIMLRISDDKYGRIRLHVENEDKKGVQLQTHPNVDKKLFTAESLIGLKNPEKSFPVNSDVGVLKWRLQTTEESFIPLTINCWPSESGNGCDVNIEYELQEDNLELNDVVITIPLPSGVGAPVIGEIDGEYRHDSRRNTLEWCLPVIDAKNKSGSLEFSIAGQPNDFFPVQVSFVSKKNYCNIQVTKVTQVDGNSPVRFSTETTFLVDKYEIL

SEQ ID NO: 322 - protein, 487 aa, Homo Sapiens
MAGTNALLMLENFIDGKFLPCSSYIDSYDPSTGEVYCRVPNSGKDEIEAAVKAAREAFPSWSSRSPQERSRVLNQVADLLEQSLEEFAQAESKDQGKTLALARTMDIPRSVQNFRFFASSSLHHTSECTQMDHLGCMHYTVRAPVGVAGLISPWNLPLYLLTWKIAPAMAAGNTVIAKPSELTSVTAWMLCKLLDKAGVPPGVVNIVFGTGPRVGEALVSHPEVPLISFTGSQPTAERITQLSAPHCKKLSLELGGKNPAIIFEDANLDECIPATVRSSFANQGEICLCTSRIFVQKSIYSEFLKRFVEATRKWKVGIPSDPLVSIGALISKAHLEKVRSYVKRALAEGAQIWCGEGVDKLSLPARNQAGYFMLPTVITDIKDESCCMTEEIFGPVTCVVPFDSEEEVIERANNVKYGLAATVWSSNVGRVHRVAKKLQSGLVWTNCWLIRELNLPFGGMKSSGIGREGAKDSYDFFTEIKTITVKH

SEQ ID NO: 323 - protein, 268 aa, Homo Sapiens
MFLVNSFLKGGGGGGGGGGGLGGGLGNVLGGLISGAGGGGGGGGGGGGGGGGGGGGTAMRILGGVISAISEAAAQYNPEPPPPRTHYSNIEANESEEVRQFRRLFAQLAGDDMEVSATELMNILNKVVTRHPDLKTDGFGIDTCRSMVAVMDSDTTGKLGFEEFKYLWNNIKRWQAIYKQFDTDRSGTICSSELPGAFEAAGFHLNEHLYNMIIRRYSDESGNMDFDNFISCLVRLDAMFRAFKSLDKDGTGQIQVNIQEWLQLTMYS

SEQ ID NO: 324 - protein, 501 aa, Homo Sapiens
MVLWGPVLGALLVVIAGYLCLPGMLRQRRPWEPPLDKGTVPWLGHAMAFRKNMFEFLKRMRTKHGDVFTVQLGGQYFTFVMDPLSFGSILKDTQRKLDFGQYAKKLVLKVFGYRSVQGDHEMIHSASTKHLRGDGLKDLNETMLDSLSFVMLTSKGWSLDASCWHEDSLFRFCYYILFTAGYLSLFGYTKDKEQDLLQAGELFMEFRKFDLLFPRFVYSLLWPREWLEVGRLQRLFHKMLSVSHSQEKEGISNWLGNMLQFLREQGVPSAMQDKFNFMMLWASQGNTGPTSFWALLYLLKHPEAIRAVREEATQVLGEARLETKQSFAFKLGALQHTPVLDSVVEETLRLRAAPTLLRLVHEDYTLKMSSGQEYLFRHGDILALFPYLSVHMDPDIHPEPTVFKYDRFLNPNGSRKVDFFKTGKKIHHYTMPWGSGVSICPGRFFALSEVKLFILLMVTHFDLELVDPDTPLPHVDPQRWGFGTMQPSHDVRFRYRLHPTE

SEQ ID NO: 325 - protein, 200 aa, Homo Sapiens
MAKGDPKKPKGKMSAYAFFVQTCREEHKKKNPEVPVNFAEFSKKCSERWKTMSGKEKSKFDEMAKADKVRYDREMKDYGPAKGGKKKKDPNAPKRPPSGFFLFCSEFRPKIKSTNPGISIGDVAKKLGEMWNNLNDSEKQPYITKAAKLKEKYEKDVADYKSKGKFDGAKGPAKVARKKVEEEDEEEEEEEEEEEEEEDE

SEQ ID NO: 326 - protein, 732 aa, Homo Sapiens
MVRSGNKAAVVLCMDVGFTMSNSIPGIESPFEQAKKVITMFVQRQVFAENKDEIALVLFGTDGTDNPLSGGDQYQNITVHRHLMLPDFDLLEDIESKIQPGSQQADFLDALIVSMDVIQHETIGKKFEKRHIEIFTDLSSRFSKSQLDIIIHSLKKCDISLQFFLPFSLGKEDGSGDRGDGPFRLGGHGPSFPLKGITEQQKEGLEIVKMVMISLEGEDGLDEIYSFSESLRKLCVFKKIERHSIHWPCRLTIGSNLSIRIAAYKSILQERVKKTWTVVDAKTLKKEDIQKETVYCLNDDDETEVLKEDIIQGFRYGSDIVPFSKVDEEQMKYKSEGKCFSVLGFCKSSQVQRRFFMGNQVLKVFAARDDEAAAVALSSLIHALDDLDMVAIVRYAYDKRANPQVGVAFPHIKHNYECLVYVQLPFMEDLRQYMFSSLKNSKKYAPTEAQLNAVDALIDSMSLAKKDEKTDTLEDLFPTTKIPNPRFQRLFQCLLHRALHPREPLPPIQQHIWNMLNPPAEVTTKSQIPLSKIKTLFPLIEAKKKDQVTAQEIFQDNHEDGPTAKKLKTEQGGAHFSVSSLAEGSVTSVGSVNPAENFRVLVKQKKASFEEASNQLINHIEQFLDTNETPYFMKSIDCIRAFREEAIKFSEEQRFNNFLKALQEKVEIKQLNHFWEIVVQDGITLITKEEASGSSVTAEEAKKFLAPKDKPSGDTAAVFEEGGDVDDLLDMI

SEQ ID NO: 327 - protein, 261 aa, Homo Sapiens
MASQLQNRLRSALALVTGAGSGIGRAVSVRLAGEGATVAACDLDRAAAQETVRLLGGPGSKEGPPRGNHAAFQADVSEARAARCLLEQVQACFSRPPSVVVSCAGITQDEFLLHMSEDDWDKVIAVNLKGTFLVTQAAAQALVSNGCRGSIINISSIVGKVGNVGQTNYAASKAGVIGLTQTAARELGRHGIRCNSVLPGFIATPMTQKVPQKVVDKITEMIPMGHLGDPEDVADVVAFLASEDSGYITGTSVEVTGGLFM

SEQ ID NO: 328 - protein, 148 aa, Homo Sapiens
MFRRPVLQVLRQFVRHESETTTSLVLERSLNRVHLLGRVGQDPVLRQVEGKNPVTIFSLATNEMWRSGDSEVYQLGDVSQKTTWHRISVFRPGLRDVAYQYVKKGSRIYLEGKIDYGEYMDKNNVRRQATTIIADNIIFLSDQTKEKE

SEQ ID NO: 329 - protein, 2078 aa, Homo Sapiens
MPGEATETVPATEQELPQPQAETAVLPMSSALSVTAALGQPGPTLPPPCSPAPQQCPLSAANQASPFPSPSTIASTPLEVPFPQSSSGTALPLGTAPEAPTFLPNLIGPPISPAALALASPMIAPTLKGTPSSSAPLALVALAPHSVQKSSAFPPNLLTSPPSVAVAESGSVITLSAPIAPSEPKTNLNKVPSEVVPNPKGTPSPPCIVSTVPYHCVTPMASIQSGVASLPQTTPTTTLAIASPQVKDTTISSVLISPQNPGSLSLKGPVSPPAALSLSTQSLPVVTSSQKTAGPNTPPDFPISLGSHLAPLHQSSFGSVQLLGQTGPSALSDPTVKTISVDHSSTGASYPSQRSVIPPLPSRNEVVPATVAAFPVVAPSVDKGPSTISSITCSPSGSLNVATSFSLSPTTSLILKSSPNATYHYPLVAQMPVSSVGTTPLVVTNPCTIAAAPTTTFEVATCVSPPMSSGPISNIEPTSPAALVMAPVAPKEPSTQVATTLRIPVSPPLPDPEDLKNLPSSVLVKFPTQKDLQTVPASLEGAPFSPAQAGLTTKKDPTVLPLVQAAPKNSPSFQSTSSSPEIPLSPEATLAKKSLGEPLPIGKPASSMTSPLGVNSSASVIKTDSYAGPDSAGPLLKSSLITPTVAAFPLESADPAGVAPTTAKGTSTYTTTASPFLEGTVSLAPKNHPVKEGTLTTLPLVPTASENCPVAPSPQNTCAPLATLVLAPEIPKSVPSPSLPPAGTPPGTKKVDGISHTSALAPVASSPKECPTEDSGASATASSKGTLTYLADSPSPLGVSVSPQTKRPPTKKGSAGPDTPIGNLSSPVSPVEASFLPENSLSFQGSKDSPATTHSPTPPSPKGAPTPSAVTPLSPKGVTLPPKETPTPSVVNLPFPKEGPATPAPKQAPALSMTSSSPKKARATPAPKGIPASPSPKGAPTPPAATPPSPKGGPATPSPKWAPTPPAATPPSPKGGPATPSPKGAPTPPAATPPSPKGGPATPSPKGAPTPPAVTPPSPKGSPAATPFPKGASTPPAATPPSPKGSPAATPLPKGAPTTPAATLPSPKGGPATPSLKGAPTPPAATPPSPKGGPATPSPKGAPMPPAATPPSPKGGLATPPHKGAPTTPAATPPSPKGGLATPPPKGAPTTPAATPPSPKGGLATPPPKGAPTTPAATPPSPKGGLATPSPKGAPTTPAATPPSPKGGLATPSPKGAPTTPAATPPSPKGGLATPSPKGAPTTPAATPPSPKGGPATPPPKGAPTPPAATPPSLKGGLATPPHKGAPNPAVVTPPSPKGGPATSPPKGAPTPPAATPPSPKGSPGTPPPKGAPTPPAVTPPSPKGTPTLPATTPSSKGGPTTPSSKEGPTPPAATPSHKGGPAMTPPSPKRGPAIPSPKGDPTSPAVIPLSPKKAPATPVTREGAATPSKGDLTPPAVTPVSLKKAPATSAPKGGPATPSSKGDPTLPAVTPPSPKEPPAPKQVATSSSPKKAPATPAPMGAPTLPAVIPSSPKEVPATPSSRRDPIAPTATLLSKKTPATLAPKEALIPPAMTVPSPKKTPAIPTPKEAPATPSSKEASSPPAVTPSTYKGAPSPKELLIPPAVTSPSPKEAPTPPAVTPPSPEKGPATPAPKGTPTSPPVTPSSLKDSPTSPASVTCKMGATVPQASKGLPAKKGPTALKEVLVAPAPESTPIITAPTRKGPQTKKSSATSPPICPDPSAKNGSKGPLSTVAPAPLLPVQKDSSKTAKGKDASHSPKGPLAPPESKASTPLTAAAFEKVLPKPESASVSAAPSPPVSLPLAPSPVPTLPPKQQFLPSSPGLVLESPSKPLAPADEDELLPLIPPEPISGGVPFQSVLVNMPTPKSAGIPVPTPSAKQPVTKNNKGSGTESDSDESVPELEEQDSTQATTQQAQLAAAAEIDEEPVSKAKQSRSEKKARKAMSKLGLRQVTGVTRVTIRKSKNILFVITKPDVYKSPASDTYIVFGEAKIEDLSQQAQLAAAEKFKVQGEAVSNIQENTQTPTVQEESEEEEVDETGVEVKDIELVMSQANVSRAKAVRALKNNSNDIVNAIMELTM

SEQ ID NO: 330 - protein, 711 aa, Homo Sapiens
MSDYSTGGPPPGPPPPAGGGGGAGGAGGGPPPGPPGAGDRGGGGPGGGGPGGGSAGGPSQPPGGGGPGIRKDAFADAVQRARQIAAKIGGDAATTVNNSTPDFGFGGQKRQLEDGDQPESKKLASQGDSISSQLGPIHPPPRTSMTEEYRVPDGMVGLIIGRGGEQINKIQQDSGCKVQISPDSGGLPERSVSLTGAPESVQKAKMMLDDIVSRGRGGPPGQFHDNANGGQNGTVQEIMIPAGKAGLVIGKGGETIKQLQERAGVKMILIQDGSQNTNVDKPLRIIGDPYKVQQACEMVMDILRERDQGGFGDRNEYGSRIGGGIDVPVPRHSVGVVIGRSGEMIKKIQNDAGVRIQFKQDDGTGPEKIAHIMGPPDRCEHAARIINDLLQSLRSGPPGPPGGPGMPPGGRGRGRGQGNWGPPGGEMTFSIPTHKCGLVIGRGGENVKAINQQTGAFVEISRQLPPNGDPNFKLFIIRGSPQQIDHAKQLIEEKIEGPLCPVGPGPGGPGPAGPMGPFNPGPFNQGPPGAPPHAGGPPPHQYPPQGWGNTYPQWQPPAPHDPSKAAAAAADPNAAWAAYYSHYYQQPPGPVPGPAPAPAAPPAQGEPPQPPPTGQSDYTKAWEEYYKKIGQQPQQPGAPPQQDYTKAWEEYYKKQAQVATGGGPGAPPGSQPDYSAAWAEYYRQQAAYYGQTPGPGGPQPPPTQQGQQQAQ

SEQ ID NO: 331 - protein, 173 aa, Homo Sapiens
MAAMASLGALALLLLSSLSRCSAEACLEPQITPSYYTTSDAVISTETVFIVEISLTCKNRVQNMALYADVGGKQFPVTRGQDVGRYQVSWSLDHKSAHAGTYEVRFFDEESYSLLRKAQRNNEDISIIPPLFTVSVDHRGTWNGPWVSTEVLAAAIGLVIYYLAFSAKSHIQA

SEQ ID NO: 332 - protein, 531 aa, Homo Sapiens
MSKPHSEAGTAFIQTQQLHAAMADTFLEHMCRLDIDSPPITARNTGIICTIGPASRSVETLKEMIKSGMNVARLNFSHGTHEYHAETIKNVRTATESFASDPILYRPVAVALDTKGPEIRTGLIKGSGTAEVELKKGATLKITLDNAYMEKCDENILWLDYKNICKVVEVGSKIYVDDGLISLQVKQKGADFLVTEVENGGSLGSKKGVNLPGAAVDLPAVSEKDIQDLKFGVEQDVDMVFASFIRKASDVHEVRKVLGEKGKNIKIISKIENHEGVRRFDEILEASDGIMVARGDLGIEIPAEKVFLAQKMMIGRCNRAGKPVICATQMLESMIKKPRPTRAEGSDVANAVLDGADCIMLSGETAKGDYPLEAVRMQHLIAREAEAAMFHRKLFEELVRASSHSTDLMEAMAMGSVEASYKCLAAALIVLTESGRSAHQVARYRPRAPIIAVTRNPQTARQAHLYRGIFPVLCKDPVQEAWAEDVDLRVNFAMNVGKARGFFKKGDVVIVLTGWRPGSGFTNTMRVVPVP

SEQ ID NO: 333 - protein, 758 aa, Homo Sapiens
MLRACQLSGVTAAAQSCLCGKFVLRPLRPCRRYSTSGSSGLTTGKIAGAGLLFVGGGIGGTILYAKWDSHFRESVEKTIPYSDKLFEMVLGPAAYNVPLPKKSIQSGPLKISSVSEVMKESKQPASQLQKQKGDTPASATAPTEAAQIISAAGDTLSVPAPAVQPEESLKTDHPEIGEGKPTPALSEEASSSSIRERPPEEVAARLAQQEKQEQVKIESLAKSLEDALRQTASVTLQAIAAQNAAVQAVNAHSNILKAAMDNSEIAGEKKSAQWRTVEGALKERRKAVDEAADALLKAKEELEKMKSVIENAKKKEVAGAKPHITAAEGKLHNMIVDLDNVVKKVQAAQSEAKVVSQYHELVVQARDDFKRELDSITPEVLPGWKGMSVSDLADKLSTDDLNSLIAHAHRRIDQLNRELAEQKATEKQHITLALEKQKLEEKRAFDSAVAKALEHHRSEIQAEQDRKIEEVRDAMENEMRTQLRRQAAAHTDHLRDVLRVQEQELKSEFEQNLSEKLSEQELQFRRLSQEQVDNFTLDINTAYARLRGIEQAVQSHAVAEEEARKAHQLWLSVEALKYSMKTSSAETPTIPLGSAVEAIKANCSDNEFTQALTAAIPPESLTRGVYSEETLRARFYAVQKLARRVAMIDETRNSLYQYFLSYLQSLLLFPPQQLKPPPELCPEDINTFKLLSYASYCIEHGDLELAAKFVNQLKGESRRVAQDWLKEARMTLETKQIVEILTAYASAVGIGTTQVQPE

SEQ ID NO: 334 - protein, 416 aa, Homo Sapiens
MSRTFSAKGGRDLVEGPQYLMPPKKGGDGIKPPPIIGRFGTSLKIGIVGLPNVGKSTFFNVLTNSQASAENFPFCTIDPNESRVPVPDERFDFLCQYHKPASKIPAFLNVVDIAGLVKGAHNGQGLGNAFLSHISACDGIFHLTRAFEDDDITHVEGSVDPIRDIEIIHEELQLKDEEMIGPIIDKLEKVAVRGGDKKLKPEYDIMCKVKSWVIDQKKPVRFYHDWNDKEIEVLNKHLFLTSKPMVYLVNLSEKDYIRKKNKWLIKIKEWVDKYDPGALVIPFSGALELKLQELSAEERQKYLEANMTQSALPKIIKAGFAALQLEYFFTAGPDEVRAWTIRKGTKAPQAAGKIHTDFEKGFIMAEVMKYEDFKEEGSENAVKAAGKYRQQGRNYIVEDGDIIFFKFNTPQQPKKK

SEQ ID NO: 335 - protein, 662 aa, Homo Sapiens
MSHVAVENALGLDQQFAGLDLNSSDNQSGGSTASKGRYIPPHLRNREATKGFYDKDSSGWSSSKDKDAYSSFGSRSDSRGKSSFFSDRGSGSRGRFDDRGRSDYDGIGSRGDRSGFGKFERGGNSRWCDKSDEDDWSKPLPPSERLEQELFSGGNTGINFEKYDDIPVEATGNNCPPHIESFSDVEMGEIIMGNIELTRYTRPTPVQKHAIPIIKEKRDLMACAQTGSGKTAAFLLPILSQIYSDGPGEALRAMKENGRYGRRKQYPISLVLAPTRELAVQIYEEARKFSYRSRVRPCVVYGGADIGQQIRDLERGCHLLVATPGRLVDMMERGKIGLDFCKYLVLDEADRMLDMGFEPQIRRIVEQDTMPPKGVRHTMMFSATFPKEIQMLARDFLDEYIFLAVGRVGSTSENITQKVVWVEESDKRSFLLDLLNATGKDSLTLVFVETKKGADSLEDFLYHEGYACTSIHGDRSQRDREEALHQFRSGKSPILVATAVAARGLDISNVKHVINFDLPSDIEEYVHRIGRTGRVGNLGLATSFFNERNINITKDLLDLLVEAKQEVPSWLENMAYEHHYKGSSRGRSKSSRFSGGFGARDYRQSSGASSSSFSSSRASSSRSGGGGHGSSRGFGGGGYGGFYNSDGYGGNYNSQGVDWWGN

SEQ ID NO: 336 - protein, 224 aa, Homo Sapiens
MPRPGSAQRWAAVAGRWGCRLLALLLLVPGPGGASEITFELPDNAKQCFYEDIAQGTKCTLEFQVITGGHYDVDCRLEDPDGKVLYKEMKKQYDSFTFTASKNGTYKFCFSNEFSTFTHKTVYFDFQVGEDPPLFPSENRVSALTQMESACVSIHEALKSVIDYQTHFRLREAQGRSRAEDLNTRVAYWSVGEALILLVVSIGQVFLLKSFFSDKRTTTTRVGS

SEQ ID NO: 337 - protein, 609 aa, Homo Sapiens
MSGWESYYKTEGDEEAEEEQEENLEASGDYKYSGRDSLIFLVDASKAMFESQSEDELTPFDMSIQCIQSVYISKIISSDRDLLAVVFYGTEKDKNSVNFKNIYVLQELDNPGAKRILELDQFKGQQGQKRFQDMMGHGSDYSLSEVLWVCANLFSDVQFKMSHKRIMLFTNEDNPHGNDSAKASRARTKAGDLRDTGIFLDLMHLKKPGGFDISLFYRDIISIAEDEDLRVHFEESSKLEDLLRKVRAKETRKRALSRLKLKLNKDIVISVGIYNLVQKALKPPPIKLYRETNEPVKTKTRTFNTSTGGLLLPSDTKRSQIYGSRQIILEKEETEELKRFDDPGLMLMGFKPLVLLKKHHYLRPSLFVYPEESLVIGSSTLFSALLIKCLEKEVAALCRYTPRRNIPPYFVALVPQEEELDDQKIQVTPPGFQLVFLPFADDKRKMPFTEKIMATPEQVGKMKAIVEKLRFTYRSDSFENPVLQQHFRNLEALALDLMEPEQAVDLTLPKVEAMNKRLGSLVDEFKELVYPPDYNPEGKVTKRKHDNEGSGSKRPKVEYSEEELKTHISKGTLGKFTVPMLKEACRAYGLKSGLKKQELLEALTKHFQD

SEQ ID NO: 338 - protein, 292 aa, Homo Sapiens
MASSMRSLFSDHGKYVESFRRFLNHSTEHQCMQEFMDKKLPGIIGRIGDTKSEIKILSIGGGAGEIDLQILSKVQAQYPGVCINNEVVEPSAEQIAKYKELVAKTSNLENVKFAWHKETSSEYQSRMLEKKELQKWDFIHMIQMLYYVKDIPATLKFFHSLLGTNAKMLIIVVSGSSGWDKLWKKYGSRFPQDDLCQYITSDDLTQMLDNLGLKYECYDLLSTMDISDCFIDGNENGDLLWDFLTETCNFNATAPPDLRAELGKDLQEPEFSAKKEGKVLFNNTLSFIVIEA

SEQ ID NO: 339 - protein, 119 aa, Homo Sapiens
MKLVRFLMKLSHETVTIELKNGTQVHGTITGVDVSMNTHLKAVKMTLKNREPVQLETLSIRGNNIRYFILPDSLPLDTLLVDVEPKVKSKKREAVAGRGRGRGRGRGRGRGRGRGGPRR

SEQ ID NO: 340 - protein, 286 aa, Homo Sapiens
MRLLPRLLLLLLLVFPATVLFRGGPRGLLAVAQDLTEDEETVEDSIIEDEDDEAEVEEDEPTDLVEDKEEEDVSGEPEASPSADTTILFVKGEDFPANNIVKFLVGFTNKGTEDFIVESLDASFRYPQDYQFYIQNFTALPLNTVVPPQRQATFEYSFIPAEPMGGRPFGLVINLNYKDLNGNVFQDAVFNQTVTVIEREDGLDGETIFMYMFLAGLGLLVIVGLHQLLESRKRKRPIQKVEMGTSSQNDVDMSWIPQETLNQINKASPRRLPRKRAQKRSVGSDE

SEQ ID NO: 341 - protein, 208 aa, Homo Sapiens
MSTGGDFGNPLRKFKLVFLGEQSVGKTSLITRFMYDSFDNTYQATIGIDFLSKTMYLEDRTVRLQLWDTAGQERFRSLIPSYIRDSTVAVVVYDITNVNSFQQTTKWIDDVRTERGSDVIIMLVGNKTDLADKRQVSIEEGERKAKELNVMFIETSAKAGYNVKQLFRRVAAALPGMESTQDRSREDMIDIKLEKPQEQPVSEGGCSC

SEQ ID NO: 342 - protein, 1394 aa, Homo Sapiens
MAALLRSARWLLRAGAAPRLPLSLRLLPGGPGRLHAASYLPAARAGPVAGGLLSPARLYAIAAKEKDIQEESTFSSRKISNQFDWALMRLDLSVRRTGRIPKKLLQKVFNDTCRSGGLGGSHALLLLRSCGSLLPELKLEERTEFAHRIWDTLQKLGAVYDVSHYNALLKVYLQNEYKFSPTDFLAKMEEANIQPNRVTYQRLIASYCNVGDIEGASKILGFMKTKDLPVTEAVFSALVTGHARAGDMENAENILTVMRDAGIEPGPDTYLALLNAYAEKGDIDHVKQTLEKVEKSELHLMDRDLLQIIFSFSKAGYPQYVSEILEKVTCERRYIPDAMNLILLLVTEKLEDVALQILLACPVSKEDGPSVFGSFFLQHCVTMNTPVEKLTDYCKKLKEVQMHSFPLQFTLHCALLANKTDLAKALMKAVKEEGFPIRPHYFWPLLVGRRKEKNVQGIIEILKGMQELGVHPDQETYTDYVIPCFDSVNSARAILQENGCLSDSDMFSQAGLRSEAANGNLDFVLSFLKSNTLPISLQSIRSSLLLGFRRSMNINLWSEITELLYKDGRYCQEPRGPTEAVGYFLYNLIDSMSDSEVQAKEEHLRQYFHQLEKMNVKIPENIYRGIRNLLESYHVPELIKDAHLLVESKNLDFQKTVQLTSSELESTLETLKAENQPIRDVLKQLILVLCSEENMQKALELKAKYESDMVTGGYAALINLCCRHDKVEDALNLKEEFDRLDSSAVLDTGKYVGLVRVLAKHGKLQDAINILKEMKEKDVLIKDTTALSFFHMLNGAALRGEIETVKQLHEAIVTLGLAEPSTNISFPLVTVHLEKGDLSTALEVAIDCYEKYKVLPRIHDVLCKLVEKGETDLIQKAMDFVSQEQGEMVMLYDLFFAFLQTGNYKEAKKIIETPGIRARSARLQWFCDRCVANNQVETLEKLVELTQKLFECDRDQMYYNLLKLYKINGDWQRADAVWNKIQEENVIPREKTLRLLAEILREGNQEVPFDVPELWYEDEKHSLNSSSASTTEPDFQKDILIACRLNQKKGAYDIFLNAKEQNIVFNAETYSNLIKLLMSEDYFTQAMEVKAFAETHIKGFTLNDAANSRLIITQVRRDYLKEAVTTLKTVLDQQQTPSRLAVTRVIQALAMKGDVENIEVVQKMLNGLEDSIGLSKMVFINNIALAQIKNNNIDAAIENIENMLTSENKVIEPQYFGLAYLFRKVIEEQLEPAVEKISIMAERLANQFAIYKPVTDFFLQLVDAGKVDDARALLQRCGAIAEQTPILLLFLLRNSRKQGKASTVKSVLELIPELNEKEEAYNSLMKSYVSEKDVTSAKALYEHLTAKNTKLDDLFLKRYASLLKYAGEPVPFIEPPESFEFYAQQLRKLRENSS

SEQ ID NO: 343 - protein, 219 aa, Homo Sapiens
MESQEPTESSQNGKQYIISEELISEGKWVKLEKTTYMDPTGKTRTWESVKRTTRKEQTADGVAVIPVLQRTLHYECIVLVKQFRPPMGGYCIEFPAGLIDDGETPEAAALRELEEETGYKGDIAECSPAVCMDPGLSNCTIHIVTVTINGDDAENARPKPKPGDGEFVEVISLPKNDLLQRLDALVAEEHLTVDARVYSYALALKHANAKPFEVPFLKF

SEQ ID NO: 344 - protein, 947 aa, Homo Sapiens [sequence omitted]

SEQ ID NO: 345 - protein, 711 aa, Homo Sapiens
MKLKLNVLTIILLPVHLLITIYSALIFIPWYFLTNAKKKNAMAKRIKAKPTSDKPGSPYRSVTHFDSLAVIDIPGADTLDKLFDHAVSKFGKKDSLGTREILSEENEMQPNGKVFKKLILGNYKWMNYLEVNRRVNNFGSGLTALGLKPKNTIAIFCETRAEWMIAAQTCFKYNFPLVTLYATLGKEAVVHGLNESEASYLITSVELLESKLKTALLDISCVKHIIYVDNKAINKAEYPEGFEIHSMQSVEELGSNPENLGIPPSRPTPSDMAIVMYTSGSTGRPKGVMMHHSNLIAGMTGQCERIPGLGPKDTYIGYLPLAHVLELTAEISCFTYGCRIGYSSPLTLSDQSSKIKKGSKGDCTVLKPTLMAAVPEIMDRIYKNVMSKVQEMNYIQKTLFKIGYDYKLEQIKKGYDAPLCNLLLFKKVKALLGGNVRMMLSGGAPLSPQTHRFMNVCFCCPIGQGYGLTESCGAGTVTEVTDYTTGRVGAPLICCEIKLKDWQEGGYTINDKPNPRGEIVIGGQNISMGYFKNEEKTAEDYSVDENGQRWFCTGDIGEFHPDGCLQIIDRKKDLVKLQAGEYVSLGKVEAALKNCPLIDNICAFAKSDQSYVISFVVPNQKRLTLLAQQKGVEGTWVDICNNPAMEAEILKEIREAANAMKLERFEIPIKVRLSPEPWTPETGLVTDAFKLKRKELRNHYLKDIERMYGGK

SEQ ID NO: 346 - protein, 1268 aa, Homo Sapiens [sequence omitted]

SEQ ID NO: 347 - protein, 547 aa, Homo Sapiens [sequence omitted]

SEQ ID NO: 348 - protein, 391 aa, Homo Sapiens
MVEADRPGKLFIGGLNTETNEKALEAVFGKYGRIVEVLLMKDRETNKSRGFAFVTFESPADAKDAARDMNGKSLDGKAIKVEQATKPSFESGRRGPPPPPRSRGPPRGLRGGRGGSGGTRGPPSRGGHMDDGGYSMNFNMSSSRGPLPVKRGPPPRSGGPPPKRSAPSGPVRSSSGMGGRAPVSRGRDSYGGPPRREPLPSRRDVYLSPRDDGYSTKDSYSSRDYPSSRDTRDYAPPPRDYTYRDYGHSSSRDDYPSRGYSDRDGYGRDRDYSDHPSGGSYRDSYESYGNSRSAPPTRGPPPSYGGSSRYDDYSSSRDGYGGSRDSYSSSRSDLYSSGRDRVGRQERGLPPSMERGYPPPRDSYSSSSRGAPRGGGRGGSRSDRGGGRSRY

SEQ ID NO: 349 - protein, 2429 aa, Homo Sapiens
MVALSLKISIGNVVKTMQFEPSTMVYDACRIIRERIPEAPAGPPSDFGLFLSDDDPKKGIWLEAGKALDYYMLRNGDTMEYRKKQRPLKIRMLDGTVKTIMVDDSKTVTDMLMTICARIGITNHDEYSLVRELMEEKKEEITGTLRKDKTLLRDEKKMEKLKQKLHTDDELNWLDHGRTLREQGVEEHETLLLRRKFFYSDQNVDSRDPVQLNLLYVQARDDILNGSHPVSFDKACEFAGFQCQIQFGPHNEQKHKAGFLDLKDFLPKEYVKQKGERKIFQAHKNCGQMSEIEAKVRYVKLARSLKTYGVSFFLVKEKMKGKNKLVPRLLGITKECVMRVDEKTKEVIQEWNLTNIKRWAASPKSFTLDFGDYQDGYYSVQTTEGEQIAQLIAGYIDIILKKKKSKDHFGLEGDEESTMLEDSVSPKKSTVLQQQYNRVGKVEHGSVALPAIMRSGASGPENFQVGSMPPAQQQITSGQMHRGHMPPLTSAQQALTGTINSSMQAVQAAQATLDDFDTLPPLGQDAASKAWRKNKMDESKHEIHSQVDAITAGTASVVNLTAGDPAETDYTAVGCAVTTISSNLTEMSRGVKLLAALLEDEGGSGRPLLQAAKGLAGAVSELLRSAQPASAEPRQNLLQAAGNVGQASGELLQQIGESDTDPHFQDALMQLAKAVASAAAALVLKAKSVAQRTEDSGLQTQVIAAATQCALSTSQLVACTKVVAPTISSPVCQEQLVEAGRLVAKAVEGCVSASQAATEDGQLLRGVGAAATAVTQALNELLQHVKAHATGAGPAGRYDQATDTILTVTENIFSSMGDAGEMVRQARILAQATSDLVNAIKADAEGESDLENSRKLLSAAKILADATAKMVEAAKGAAAHPDSEEQQQRLREAAEGLRMATNAAAQNAIKKKLVQRLEHAAKQAAASATQTIAAAQHAASTPKASAGPQPLLVQSCKAVAEQIPLLVQGVRGSQAQPDSPSAQLALIAASQSFLQPGGKMVAAAKASVPTIQDQASAMQLSQCAKNLGTALAELRTAAQKAQEACGPLEMDSALSVVQNLEKDLQEVKAAARDGKLKPLPGETMEKCTQDLGNSTKAVSSAIAQLLGEVAQGNENYAGIAARDVAGGLRSLAQAARGVAALTSDPAVQAIVLDTASDVLDKASSLIEEAKKAAGHPGDPESQQRLAQVAKAVTQALNRCVSCLPGQRDVDNALRAVGDASKRLLSDSLPPSTGTFQEAQSRLNEAAAGLNQAATELVQASRGTPQDLARASGRFGQDFSTFLEAGVEMAGQAPSQEDRAQVVSNLKGISMSSSKLLLAAKALSTDPAAPNLKSQLAAAARAVTDSINQLITMCTQQAPGQKECDNALRELETVRELLENPVQPINDMSYFGCLDSVMENSKVLGEAMTGISQNAKNGNLPEFGDAISTASKALCGFTEAAAQAAYLVGVSDPNSQAGQQGLVEPTQFARANQAIQMACQSLGEPGCTQAQVLSAATIVAKHTSALCNSCRLASARTTNPTAKRQFVQSAKEVANSTANLVKTIKALDGAFTEENRAQCRAATAPLLEAVDNLSAFASNPEFSSIPAQISPEGRAAMEPIVISAKTMLESAGGLIQTARALAVNPRDPPSWSVLAGHSRTVSDSIKKLITSMRDKAPGQLECETAIAALNSCLRDLDQASLAAVSQQLAPLQEISHLIEPLANAARAEASQLGHKVSQMAQYFEPLTLAAVGAASKTLSHPQQMALLDQTKTLAESALQLLYTAKEAGGNPKLDEGPMGEPEGSFVDYQTTMVRTAKAIAVTVQEMIGSHIKHRVQELGHGCAALVTKAGALQCSPSDAYTKKELIECARRVSEKVSHVLAALQAGNRGTQACITAASAVSGIIADLDTTIMFATAGTLNREGTETFADHREGILKTAKVLVEDTKVLVQNAAGSQEKLAQAAQSSVATITRLADVVKLGAASLGAEDPETQVVLINAVKDVAKALGDLISATKAAAGKVGDDPAVWQLKNSAKVMVTNVTSLLKTVKAVEDEATKGTRALEATTEHIRQELAPPAKTSTPEDFIRMTKGITMATAKAVAAGNSCRQEDVIATANLSRRAIADMLRACKEAAYHPEVAPDVRLRALHYGRECANGYLELLDHVLLTLQKPSPELKQQLTGHSKRVAGSVTELIQAAEAMKGTEWVDPEDPTVIAENELLGAAAAIEAAAKKLEQLKPRAKPKEADESLNFEEQILEAAKSIAAATSALVKAASAAQRELVAQGKVGAIPANALDDGQWSQGLISAARMVAAATNNLCEAANAAVQGHASQEKLISSAKQVAASTAQLLVACKVKADQDSEAMKRLQAAGNAVKRASDNLVKAAQKAAAFEEQENETVVVKEKMVGGIAQIIAAQEEMLRKERELEEARKKLAQIRQQQYKFLPSELRDEH

SEQ ID NO: 350 - protein, 359 aa, Homo Sapiens
MPLELELCPGRWVGGQHPCFIIAEIGQNHQGDLDVAKRMIRMAKECGADCAKFQKSELEFKFNRKALERPYTSKHSWGKTYGEHKRHLEFSHDQYRELQRYAEEVGIFFTASGMDEMAVEFLHELNVPFFKVGSGDTNNFPYLEKTAKKGRPMVISSGMQSMDTMKQVYQIVKPLNPNFCFLQCTSAYPLQPEDVNLRVISEYQKLFPDIPIGYSGHETGIAISVAAVALGAKVLERHITLDKTWKGSDHSASLEPGELAELVRSVRLVERALGSPTKQLLPCEMACNEKLGKSVVAKVKIPEGTILTMDMLTVKVGEPKGYPPEDIFNLVGKKVLVTVEEDDTIMEELVDNHGKKIKS

SEQ ID NO: 351 - protein, 271 aa, Homo Sapiens
MPEAPPLLLAAVLLGLVLLVVLLLLLRHWGWGLCLIGWNEFILQPIHNLLMGDTKEQRILNHVLQHAEPGNAQSVLEAIDTYCEQKEWAMNVGDKKGKIVDAVIQEHQPSVLLELGAYCGYSAVRMARLLSPGARLITIEINPDCAAITQRMVDFAGVKDKVTLVVGASQDIIPQLKKKYDVDTLDMVFLDHWKDRYLPDTLLLEECGLLRKGTVLLADNVICPGAPDFLAHVRGSSCFECTHYQSFLEYREVVDGLEKAIYKGPGSEAGP

SEQ ID NO: 352 - protein, 484 aa, Homo Sapiens
MARLLRSATWELFPWRGYCSQKAKGELCRDFVEALKAVVGGSHVSTAAVVREQHGRDESVHRCEPPDAVVWPQNVEQVSRLAALCYRQGVPIIPFGTGTGLEGGVCAVQGGVCVNLTHMDRILELNQEDFSVVVEPGVTRKALNAHLRDSGLWFPVDPGADASLCGMAATGASGTNAVRYGTMRDNVLNLEVVLPDGRLLHTAGRGRHFRKSAAGYNLTGLFVGSEGTLGLITATTLRLHPAPEATVAATCAFPSVQAAVDSTVHILQAAVPVARIEFLDEVMMDACNRYSKLNCLVAPTLFLEFHGSQQALEEQLQRTEEIVQQNGASDFSWAKEAEERSRLWTARHNAWYAALATRPGCKGYSTDVCVPISRLPEIVVQTKEDLNASGLTGSIVGHVGDGNFHCILLVNPDDAEELGRVKAFAEQLGRRALALHGTCTGEHGIGMGKRQLLQEEVGAVGVETMRQLKAVLDPQGLMNPGKVL

SEQ ID NO: 353 - protein, 215 aa, Homo Sapiens
MVLLTMIARVADGLPLAASMQEDEQSGRDLQQYQSQAKQLFRKLNEQSPTRCTLEAGAMTFHYIIEQGVCDLVLCEAAFPKTLAFAYLEDLHSEFDEQHGKKVPTVSRPYSFIEFDTFIQKTKKLYIDSCARRNLGSINTELQDVQRIMVANIEEVLQRGEALSALDSKANNLSSLSKKYRQDAKYLNMHSTYAKLAAVAVFFIMLIVYVRFWWL

SEQ ID NO: 354 - protein, 203 aa, Homo Sapiens
MCAARLAAAAAAAQSVYAFSARPLAGGEPVSLGSLRGKVLLIENVASLCGTTVRDYTQMNELQRRLGPRGLVVLGFPCNQFGHQENAKNEEILNSLKYVRPGGGFEPNFMLFEKCEVNGAGAHPLFAFLREALPAPSDDATALMTDPKLITWSPVCRNDVAWNFEKFLVGPDGVPLRRYSRRFQTIDIEPDIEALLSQGPSCA

SEQ ID NO: 355 - protein, 125 aa, Homo Sapiens [sequence omitted]

SEQ ID NO: 356 - protein, 525 aa, Homo Sapiens
MASNDYTQQATQSYGAYPTQPGQGYSQQSSQPYGQQSYSGYSQSTDTSGYGQSSYSSYGQSQNSYGTQSTPQGYGSTGGYGSSQSSQSSYGQQSSYPGYGQQPAPSSTSGSYGSSSQSSSYGQPQSGSYSQQPSYGGQQQSYGQQQSYNPPQGYGQQNQYNSSSGGGGGGGGGGNYGQDQSSMSSGGGSGGGYGNQDQSGGGGSGGYGQQDRGGRGRGGSGGGGGGGGGGYNRSSGGYEPRGRGGGRGGRGGMGGSDRGGFNKFGGPRDQGSRHDSEQDNSDNNTIFVQGLGENVTIESVADYFKQIGIIKTNKKTGQPMINLYTDRETGKLKGEATVSFDDPPSAKAAIDWFDGKEFSGNPIKVSFATRRADFNRGGGNGRGGRGRGGPMGRGGYGGGGSGGGGRGGFPSGGGGGGGQQRAGDWKCPNPTCENMNFSWRNECNQCKAPKPDGPGGGPGGSHMGGNYGDDRRGGRGGYDRGGYRGRGGDRGGFRGGRGGGDRGGFGPGKMDSRGEHRQDRRERPY

SEQ ID NO: 357 - protein, 432 aa, Homo Sapiens
MSDKLPYKVADIGLAAWGRKALDIAENEMPGLMRMRERYSASKPLKGARIAGCLHMTVETAVLIETLVTLGAEVQWSSCNIFSTQDHAAAAIAKAGIPVYAWKGETDEEYLWCIEQTLYFKDGPLNMILDDGGDLTNLIHTKYPQLLPGIRGISEETTTGVHNLYKMMANGILKVPAINVNDSVTKSKFDNLYGCRESLIDGIKRATDVMIAGKVAVVAGYGDVGKGCAQALRGFGARVIITEIDPINALQAAMEGYEVTTMDEACQEGNIFVTTTGCIDIILGRHFEQMKDDAIVCNIGHFDVEIDVKWLNENAVEKVNIKPQVDRYRLKNGRRIILLAEGRLVNLGCAMGHPSFVMSNSFTNQVMAQIELWTHPDKYPVGVHFLPKKLDEAVAEAHLGKLNVKLTKLTEKQAQYLGMSCDGPFKPDHYRY

SEQ ID NO: 358 - protein, 997 aa, Homo Sapiens
MENAHTKTVEEVLGHFGVNESTGLSLEQVKKLKERWGSNELPAEEGKTLLELVIEQFEDLLVRILLLAACISFVLAWFEEGEETITAFVEPFVILLILVANAIVGVWQERNAENAIEALKEYEPEMGKVYRQDRKSVQRIKAKDIVPGDIVEIAVGDKVPADIRLTSIKSTTLRVDQSILTGESVSVIKHTDPVPDPRAVNQDKKNMLFSGTNIAAGKAMGVVVATGVNTEIGKIRDEMVATEQERTPLQQKLDEFGEQLSKVISLICIAVWIINIGHFNDPVHGGSWIRGAIYYFKIAVALAVAAIPEGLPAVITTCLALGTRRMAKKNAIVRSLPSVETLGCTSVICSDKTGTLTTNQMSVCRMFILDRVEGDTCSLNEFTITGSTYAPIGEVHKDDKPVNCHQYDGLVELATICALCNDSALDYNEAKGVYEKVGEATETALTCLVEKMNVFDTELKGLSKIERANACNSVIKQLMKKEFTLEFSRDRKSMSVYCTPNKPSRTSMSKMFVKGAPEGVIDRCTHIRVGSTKVPMTSGVKQKIMSVIREWGSGSDTLRCLALATHDNPLRREEMHLEDSANFIKYETNLTFVGCVGMLDPPRIEVASSVKLCRQAGIRVIMITGDNKGTAVAICRRIGIFGQDEDVTSKAFTGREFDELNPSAQRDACLNARCFARVEPSHKSKIVEFLQSFDEITAMTGDGVNDAPALKKAEIGIAMGSGTAVAKTASEMVLADDNFSTIVAAVEEGRAIYNNMKQFIRYLISSNVGEVVCIFLTAALGFPEALIPVQLLWVNLVTDGLPATALGFNPPDLDIMNKPPRNPKEPLISGWLFFRYLAIGCYVGAATVGAAAWWFIAADGGPRVSFYQLSHFLQCKEDNPDFEGVDCAIFESPYPMTMALSVLVTIEMCNALNSLSENQSLLRMPPWENIWLVGSICLSMSLHFLILYVEPLPLIFQITPLNVTQWLMVLKISLPVILMDETLKFVARNYLEPAILE

SEQ ID NO: 359 - protein, 390 aa, Homo Sapiens
MRGDRGRGRGGRFGSRGGPGGGFRPFVPHIPFDFYLCEMAFPRVKPAPDETSFSEALLKRNQDLAPNSAEQASILSLVTKINNVIDNLIVAPGTFEVQIEEVRQVGSYKKGTMTTGHNVADLVVILKILPTLEAVAALGNKVVESLRAQDPSEVLTMLTNETGFEISSSDATVKILITTVPPNLRKLDPELHLDIKVLQSALAAIRHARWFEENASQSTVKVLIRLLKDLRIRFPGFEPLTPWILDLLGHYAVMNNPTRQPLALNVAYRRCLQILAAGLFLPGSVGITDPCESGNFRVHTVMTLEQQDMVCYTAQTLVRILSHGGFRKILGQEGDASYLASEISTWDGVIVTPSEKAYEKPPEKKEGEEEEENTEEPPQGEEEESMETQE

SEQ ID NO: 360 - protein, 1270 aa, Homo Sapiens
MGDVKNFLYAWCGKRKMTPSYEIRAVGNKNRQKFMCEVQVEGYNYTGMGNSTNKKDAQSNAARDFVNYLVRINEIKSEEVPAFGVASPPPLTDTPDTTANAEGDLPTTMGGPLPPHLALKAENNSEVGASGYGVPGPTWDRGANLKDYYSRKEEQEVQATLESEEVDLNAGLHGNWTLENAKARLNQYFQKEKIQGEYKYTQVGPDHNRSFIAEMTIYIKQLGRRIFAREHGSNKKLAAQSCALSLVRQLYHLGVVEAYSGLTKKKEGETVEPYKVNLSQDLEHQLQNIIQELNLEILPPPEDPSVPVALNIGKLAQFEPSQRQNQVGVVPWSPPQSNWNPWTSSNIDEGPLAFATPEQISMDLKNELMYQLEQDHDLQAILQERELLPVKKFESEILEAISQNSVVIIRGATGCGKTTQVPQFILDDFIQNDRAAECNIVVTQPRRISAVSVAERVAFERGEEPGKSCGYSVRFESILPRPHASIMFCTVGVLLRKLEAGIRGISHVIVDEIHERDINTDFLLVVLRDVVQAYPEVRIVLMSATIDTSMFCEYFFNCPIIEVYGRTYPVQEYFLEDCIQMTHFVPPPKDKKKKDKDDDGGEDDDANCNLICGDEYGPETRLSMSQLNEKETPFELIEALLKYIETLNVPGAVLVFLPGWNLIYTMQKHLEMNPHFGSHRYQILPLHSQIPREEQRKVFDPVPVGVTKVILSTNIAETSITINDVVYVIDSCKQKVKLFTAHNNMTNYATVWASKTNLEQRKGRAGRVRPGFCFHLCSRARFERLETHMTPEMFRTPLHEIALSIKLLRLGGIGQFLAKAIEPPPLDAVIEAEHTLRELDALDANDELTPLGRILAKLPIEPRFGKMMIMGCIFYVGDAICTIAAATCFPEPFINEGKRLGYIHRNFAGNRFSDHVALLSVFQAWDDARMGGEEAEIRFCEHKRLNMATLRMTWEAKVQLKEILINSGFPEDCLLTQVFTNTGPDNNLDVVISLLAFGVYPNVCYHKEKRKILTTEGRNALIHKSSVNCPFSSQDMKYPSPFFVFGEKIRTRAISAKGMTLVTPLQLLLFASKKVQSDGQIVLVDDWIKLQISHEAAACITGLRAAMEALVVEVTKQPAIISQLDPVNERMLNMIRQISRPSAAGINLMIGSTRYGDGPRPPKMARYDNGSGYRRGGSSYSGGGYGGGYSSGGYGSGGYGGSANSFRAGYGAGVGGGYRGVSRGGFRGNSGGDYRGPSGGYRGSGGFQRGGGRGAYGTGYFGQGRGGGGY

SEQ ID NO: 361 - protein, 154 aa, Homo Sapiens
MVDLTQVMDDEVFMAFASYATIILSKMMLMSTATAFYRLTRKVFANPEDCVAFGKGENAKKYLRTDDRVERVRRAHLNDLENIIPFLGIGLLYSLSGPDPSTAILHFRLFVGARIYHTIAYLTPLPQPNRALSFFVGYGVTLSMAYRLLKSKLY

SEQ ID NO: 362 - protein, 382 aa, Homo Sapiens
MSHIQIPPGLTELLQGYTVEVLRQQPPDLVEFAVEYFTRLREARAPASVLPAATPRQSLGHPPPEPGPDRVADAKGDSESEEDEDLEVPVPSRFNRRVSVCAETYNPDEEEEDTDPRVIHPKTDEQRCRLQEACKDILLFKNLDQEQLSQVLDAMFERIVKADEHVIDQGDDGDNFYVIERGTYDILVTKDNQTRSVGQYDNRGSFGELALMYNTPRAATIVATSEGSLWGLDRVTFRRIIVKNNAKKRKMFESFIESVPLLKSLEVSERMKIVDVIGEKIYKDGERIITQTKSNKDGGNQEVEIARCHKGQYFGELALVTNKPRAASAYAVGDVKCLVMDVQAFERLLGPCMDIMKRNISHYEEQLVKMFGSSVDLGNLGQ

SEQ ID NO: 363 - protein, 750 aa, Homo Sapiens
MSQWYELQQLDSKFLEQVHQLYDDSFPMEIRQYLAQWLEKQDWEHAANDVSFATIRFHDLLSQLDDQYSRFSLENNFLLQHNIRKSKRNLQDNFQEDPIQMSMIIYSCLKEERKILENAQRFNQAQSGNIQSTVMLDKQKELDSKVRNVKDKVMCIEHEIKSLEDLQDEYDFKCKTLQNREHETNGVAKSDQKQEQLLLKKMYLMLDNKRKEVVHKIIELLNVTELTQNALINDELVEWKRRQQSACIGGPPNACLDQLQNWFTIVAESLQQVRQQLKKLEELEQKYTYEHDPITKNKQVLWDRTFSLFQQLIQSSFVVERQPCMPTHPQRPLVLKTGVQFTVKLRLLVKLQELNYNLKVKVLFDKDVNERNTVKGFRKFNILGTHTKVMNMEESTNGSLAAEFRHLQLKEQKNAGTRTNEGPLIVTEELHSLSFETQLCQPGLVIDLETTSLPVVVISNVSQLPSGWASILWYNMLVAEPRNLSFFLTPPCARWAQLSEVLSWQFSSVTKRGLNVDQLNMLGEKLLGPNASPDGLIPWTRFCKENINDKNFPFWLWIESILELIKKHLLPLWNDGCIMGFISKERERALLKDQQPGTFLLRFSESSREGAITFTWVERSQNGGEPDFHAVEPYTKKELSAVTFPDIIRNYKVMAAENIPENPLKYLYPNIDKDHAFGKYYSRPKEAPEPMELDGPKGTGYIKTELISVSEVHPSRLQTTDNLLPMSPEEFDEVSRIVGSVEFDSMMNTV

SEQ ID NO: 364 - protein, 539 aa, Homo Sapiens
MAAALRVAAVGARLSVLASGLRAAVRSLCSQATSVNERIENKRRTALLGGGQRRIDAQHKRGKLTARERISLLLDPGSFVESDMFVEHRCADFGMAADKNKFPGDSVVTGRGRINGRLVYVFSQDFTVFGGSLSGAHAQKICKIMDQAITVGAPVIGLNDSGGARIQEGVESLAGYADIFLRNVTASGVIPQISLIMGPCAGGAVYSPALTDFTFMVKDTSYLFITGPDVVKSVTNEDVTQEELGGAKTHTTMSGVAHRAFENDVDALCNLRDFFNYLPLSSQDPAPVRECHDPSDRLVPELDTIVPLESTKAYNMVDIIHSVVDEREFFEIMPNYAKNIIVGFARMNGRTVGIVGNQPKVASGCLDINSSVKGARFVRFCDAFNIPLITFVDVPGFLPGTAQEYGGIIRHGAKLLYAFAEATVPKVTVITRKAYGGAYDVMSSKHLCGDTNYAWPTAEIAVMGAKGAVEIIFKGHENVEAAQAEYIEKFANPFPAAVRGFVDDIIQPSSTRARICCDLDVLASKKVQRPWRKHANIPL

SEQ ID NO: 365 - protein, 539 aa, Homo Sapiens; identical to SEQ ID NO: 364

SEQ ID NO: 366 - protein, 104 aa, Homo Sapiens
MSHTILLVQPTKRPEGRTYADYESVNECMEGVCKMYEEHLKRMNPNSPSITYDISQLFDFIDDLADLSCLVYRADTQTYQPYNKDWIKEKIYVLLRRQAQQAGK

SEQ ID NO: 367 - protein, 1230 aa, Homo Sapiens
MASASYHISNLLEKMTSSDKDFRFMATNDLMTELQKDSIKLDDDSERKVVKMILKLLEDKNGEVQNLAVKCLGPLVSKVKEYQVETIVDTLCTNMLSDKEQLRDISSIGLKTVIGELPPASSGSALAANVCKKITGRLTSAIAKQEDVSVQLEALDIMADMLSRQGGLLVNFHPSILTCLLPQLTSPRLAVRKRTIIALGHLVMSCGNIVFVDLIEHLLSELSKNDSMSTTRTYIQCIAAISRQAGHRIGEYLEKIIPLVVKFCNVDDDELREYCIQAFESFVRRCPKEVYPHVSTIINICLKYLTYDPNYNYDDEDEDENAMDADGGDDDDQGSDDEYSDDDDMSWKVRRAAAKCLDAVVSTRHEMLPEFYKTVSPALISRFKEREENVKADVFHAYLSLLKQTRPVQSWLCDPDAMEQGETPLTMLQSQVPNIVKALHKQMKEKSVKTRQCCFNMLTELVNVLPGALTQHIPVLVPGIIFSLNDKSSSSNLKIDALSCLYVILCNHSPQVFHPHVQALVPPVVACVGDPFYKITSEALLVTQQLVKVIRPLDQPSSFDATPYIKDLFTCTIKRLKAADIDQEVKERAISCMGQIICNLGDNLGSDLPNTLQIFLERLKNEITRLTTVKALTLIAGSPLKIDLRPVLGEGVPILASFLRKNQRALKLGTLSALDILIKNYSDSLTAAMIDAVLDELPPLISESDMHVSQMAISFLTTLAKVYPSSLSKISGSILNELIGLVRSPLLQGGALSAMLDFFQALVVTGTNNLGYMDLLRMLTGPVYSQSTALTHKQSYYSIAKCVAALTRACPKEGPAVVGQFIQDVKNSRSTDSIRLLALLSLGEVGHHIDLSGQLELKSVILEAFSSPSEEVKSAASYALGSISVGNLPEYLPFVLQEITSQPKRQYLLLHSLKEIISSASVVGLKPYVENIWALLLKHCECAEEGTRNVVAECLGKLTLIDPETLLPRLKGYLISGSSYARSSVVTAVKFTISDHPQPIDPLLKNCIGDFLKTLEDPDLNVRRVALVTFNSAAHNKPSLIRDLLDTVLPHLYNETKVRKELIREVEMGPFKHTVDDGLDIRKAAFECMYTLLDSCLDRLDIFEFLNHVEDGLKDHYDIKMLTFLMLVRLSTLCPSAVLQRLDRLVEPLRATCTTKVKANSVKQEFEKQDELKRSAMRAVAALLTIPEAEKSPLMSEFQSQISSNPELAAIFESIQKDSSSTNLESMDTS

SEQ ID NO: 368 - protein, 439 aa, Homo Sapiens
MNLLPNIESPVTRQEKMATVWDEAEQDGIGEEVLKMSTEEIIQRTRLLDSEIKIMKSEVLRVTHELQAMKDKIKENSEKIKVNKTLPYLVSNVIELLDVDPNDQEEDGANIDLDSQRKGKCAVIKTSTRQTYFLPVIGLVDAEKLKPGDLVGVNKDSYLILETLPTEYDSRVKAMEVDERPTEQYSDIGGLDKQIQELVEAIVLPMNHKEKFENLGIQPPKGVLMYGPPGTGKTLLARACAAQTKATFLKLAGPQLVQMFIGDGAKLVRDAFALAKEKAPSIIFIDELDAIGTKRFDSEKAGDREVQRTMLELLNQLDGFQPNTQVKVIAATNRVDILDPALLRSGRLDRKIEFPMPNEEARARIMQIHSRKMNVSPDVNYEELARCTDDFNGAQCKAVCVEAGMIALRRGATELTHEDYMEGILEVQAKKKANLQYYA

SEQ ID NO: 369 - protein, 440 aa, Homo Sapiens
MASPVAAQAGKLLRALALRPRFLAAGSQAVQLTSRRWLNLQEYQSKKLMSDNGVRVQRFFVADTANEALEAAKRLNAKEIVLKAQILAGGRGKGVFNSGLKGGVHLTKDPNVVGQLAKQMIGYNLATKQTPKEGVKVNKVMVAEALDISRETYLAILMDRSCNGPVLVGSPQGGVDIEEVAASNPELIFKEQIDIFEGIKDSQAQRMAENLGFVGPLKSQAADQITKLYNLFLKIDATQVEVNPFGETPEGQVVCFDAKINFDDNAEFRQKDIFAMDDKSENEPIENEAAKYDLKYIGLDGNIACFVNGAGLAMATCDIIFLNGGKPANFLDLGGGVKEAQVYQAFKLLTADPKVEAILVNIFGGIVNCAIIANGITKACRELELKVPLVVRLEGTFMEKKGSYMHIKQETGNSNENITGIQENVAHQNLSKCAISIFLC

SEQ ID NO: 370 - protein, 227 aa, Homo Sapiens
MSVVPPNRSQTGWPRGVTQFGNKYIQQTKPLTLERTINLYPLTNYTFGTKEPLYEKDSSVAARFQRMREEFDKIGMRRTVEGVLIVHEHRLPHVLLLQLGTTFFKLPGGELNPGEDEVEGLKRLMTEILGRQDGVLQDWVIDDCIGNWWRPNFEPPQYPYIPAHITKPKEHKKLFLVQLQEKALFAVPKNYKLVAAPLFELYDNAPGYGPIISSLPQLLSRFNFIYN

SEQ ID NO: 371 - protein, 353 aa, Homo Sapiens
MGSGGRSAQVSTGQRAWLLPCRFLKNTMSNGYEDHMAEDCRGDIGRTNLIVNYLPQNMTQDELRSLFSSIGEVESAKLIRDKVAGHSLGYGFVNYVTAKDAERAINTLNGLRLQSKTIKVSYARPSSEVIKDANLYISGLPRTMTQKDVEDMFSRFGRIINSRVLVDQTTGLSRGVAFIRFDKRSEAEEAITSFNGHKPPGSSEPITVKFAANPNQNKNVALLSQLYHSPARRFGGPVHHQAQRFRFSPMGVDHMSGLSGVNVPGNASSGWCIFIYNLGQDADEGILWQMFGPFGAVTNVKVIRDFNTNKCKGFGFVTMTNYEEAAMAIASLNGYRLGDKILQVSFKTNKSHK

SEQ ID NO: 372 - protein, 1012 aa, Homo Sapiens
MRWGLRPRGPGAAALATARSLWGTPRLPCSPGWQGATKRLLVRSVSGASNHQPNSNSGRYRDTVLLPQTSFPMKLLGRQQPDTELEIQQKCGFSELYSWQRERKVKTEFCLHDGPPYANGDPHVGHALNKILKDIANRFHMMNGSKIHFVPGWDCHGLPIEIKVLSELGREAQNLSAMEIRKKARSFAKAAIEKQKSAFIRWGIMADWNNCYYTFDGKYEAKQLRTFYQMYDKGLVYRSYKPVFWSPSSRTALAEAELEYNPEHVSRSIYVKFPLLKPSPKLASLIDGSSPVSILVWTTQPWTIPANEAVCYMPESKYAVVKCSKSGDLYVLAADKVASVASTLETTFETISTLSGVDLENGTCSHPLIPDKASPLLPANHVTMAKGTGLVHTAPAHGMEDYGVASQHNLPMDCLVDEDGVFTDVAGPELQNKAVLEEGTDVVIKMLQTAKNLLKEEKLVHSYPYDWRTKKPVVIRASKQWFINITDIKTAAKELLKKVKFIPGSALNGMVEMMDRRPYWCISRQRVWGVPIPVFHHKTKDEYLINSQTTEHIVKLVEQHGSDIWWTLPPEQLLPKEVLSEVGGPDALEYVPGQDILDIWFDSGTSWSYVLPGPDQRADLYLEGKDQLGGWFQSSLLTSVAARKRAPYKTVIVHGFTLGEKGEKMSKSLGNVIHPDVVVNGGQDQSKEPPYGADVLRWWVADSNVFTEVAIGPSVLNAARDDISKLRNTLRFLLGNVADFNPETDSIPVNDMYVIDQYMLHLLQDLANKITELYKQYDFGKVVRLLRTFYTRELSNFYFSIIKDRLYCEKENDPKRRSCQTALVEILDVIVRSFAPILPHLAEEVFQHIPYIKEPKSVFRTGWISTSSIWKKPGLEEAVESACAMRDSFLGSIPGKNAAEYKVITVIEPGLLFEIIEMLQSEETSSTSQLNELMMASESTLLAQEPREMTADVIELKGKFLINLEGGDIREESSYKVIVMPTTKEKCPRCWKYTAESSDTLCPRCAEVVSGK

SEQ ID NO: 373 - protein, 874 aa, Homo Sapiens
MLKKFDKKDEESGGGSNPFQHLEKSAVLQEARVFNETPINPRKCAHILTKILYLINQGEHLGTTEATEAFFAMTKLFQSNDPTLRRMCYLTIKEMSCIAEDVIIVTSSLTKDMTGKEDNYRGPAVRALCQITDSTMLQAIERYMKQAIVDKVPSVSSSALVSSLHLLKCSFDVVKRWVNEAQEAASSDNIMVQYHALGLLYHVRKNDRLAVNKMISKVTRHGLKSPFAYCMMIRVASKQLEEEDGSRDSPLFDFIESCLRNKHEMVVYEAASAIVNLPGCSAKELAPAVSVLQLFCSSPKAALRYAAVRTLNKVAMKHPSAVTACNLDLENLVTDSNRSIATLAITTLLKTGSESSIDRLMKQISSFMSEISDEFKVVVVQAISALCQKYPRKHAVLMNFLFTMLREEGGFEYKRAIVDCIISIIEENSESKETGLSHLCEFIEDCEFTVLATRILHLLGQEGPKTTNPSKYIRFIYNRVVLEHEEVRAGAVSALAKFGAQNEEMLPSILVLLKRCVMDDDNEVRDRATFYLNVLEQKQKALNAGYILNGLTVSIPGLERALQQYTLEPSEKPFDLKSVPLATAPMAEQRTESTPITAVKQPEKVAATRQEIFQEQLAAVPEFRGLGPLFKSSPEPVALTESETEYVIRCTKHTFTNHMVFQFDCTNTLNDQTLENVTVQMEPTEAYEVLCYVPARSLPYNQPGTCYTLVALPKEDPTAVACTFSCMMKFTVKDCDPTTGETDDEGYEDEYVLEDLEVTVADHIQKVMKLNFEAAWDEVGDEFEKEETFTLSTIKTLEEAVGNIVKFLGMHPCERSDKVPDNKNTHTLLLAGVFRGGHDILVRSRLLLLDTVTMQVTARSLEELPVDIILASVG

SEQ ID NO: 374 - protein, 433 aa, Homo Sapiens
MPDYLGADQRKTKEDEKDDKPIRALDEGDIALLKTYGQSTYSRQIKQVEDDIQQLLKKINELTGIKESDTGLAPPALWDLAADKQTLQSEQPLQVARCTKIINADSEDPKYIINVKQFAKFVVDLSDQVAPTDIEEGMRVGVDRNKYQIHIPLPPKIDPTVTMMQVEEKPDVTYSDVGGCKEQIEKLREVVETPLLHPERFVNLGIEPPKGVLLFGPPGTGKTLCARAVANRTDACFIRVIGSELVQKYVGEGARMVRELFEMARTKKACLIFFDEIDAIGGARFDDGAGGDNEVQRTMLELINQLDGFDPRGNIKVLMATNRPDTLDPALMRPGRLDRKIEFSLPDLEGRTHIFKIHARSMSVERDIRFELLARLCPNSTGAEIRSVCTEAGMFAIRARRKIATEKDFLEAVNKVIKSYAKFSATPRYMTYN

SEQ ID NO: 375 - protein, 725 aa, Homo Sapiens
MAAASAVSVLLVAAERNRWHRLPSLLLPPRTWVWRQRTMKYTTATGRNITKVLIANRGEIACRVMRTAKKLGVQTVAVYSEADRNSMHVDMADEAYSIGPAPSQQSYLSMEKIIQVAKTSAAQAIHPGCGFLSENMEFAELCKQEGIIFIGPPPSAIRDMGIKSTSKSIMAAAGVPVVEGYHGEDQSDQCLKEHARRIGYPVMIKAVRGGGGKGMRIVRSEQEFQEQLESARREAKKSFNDDAMLIEKFVDTPRHVEVQVFGDHHGNAVYLFERDCSVQRRHQKIIEEAPAPGIKSEVRKKLGEAAVRAAKAVNYVGAGTVEFIMDSKHNFCFMEMNTRLQVEHPVTEMITGTDLVEWQLRIAAGEKIPLSQEEITLQGHAFEARIYAEDPSNNFMPVAGPLVHLSTPRADPSTRIETGVRQGDEVSVHYDPMIAKLVVWAADRQAALTKLRYSLRQYNIVGLHTNIDFLLNLSGHPEFEAGNVHTDFIPQHHKQLLLSRKAAAKESLCQAALGLILKEKAMTDTFTLQAHDQFSPFSSSSGRRLNISYTRNMTLKDGKNNVAIAVTYNHDGSYSMQIEDKTFQVLGNLYSEGDCTYLKCSVNGVASKAKLIILENTIYLFSKEGSIEIDIPVPKYLSSVSSQETQGGPLAPMTGTIEKVFVKAGDKVKAGDSLMVMIAMKMEHTIKSPKDGTVKKVFYREGAQANRHTPLVEFEEEESDKRESE

SEQ ID NO: 376 - protein, 371 aa, Homo Sapiens
MAELQEVQITEEKPLLPGQTPEAAKEAELAARILLDQGQTHSVETPYGSVTFTVYGTPKPKRPAILTYHDVGLNYKSCFQPLFQFEDMQEIIQNFVRVHVDAPGMEEGAPVFPLGYQYPSLDQLADMIPCVLQYLNFSTIIGVGVGAGAYILARYALNHPDTVEGLVLINIDPNAKGWMDWAAHKLTGLTSSIPEMILGHLFSQEELSGNSELIQKYRNIITHAPNLDNIELYWNSYNNRRDLNFERGGDITLRCPVMLVVGDQAPHEDAVVECNSKLDPTQTSFLKMADSGGQPQLTQPGKLTEAFKYFLQGMGYMASSCMTRLSRSRTASLTSAASVDGNRSRSRTLSQSSESGTLSSGPPGHTMEVSC

SEQ ID NO: 377 - protein, 362 aa, Homo Sapiens
MAAAEEEPKPKKLKVEAPQALRENILFGMGNPLLDISAVVDKDFLDKYSLKPNDQILAEDKHKELFDELVKKFKVEYHAGGSTQNSIKVAQWMIQQPHKAATFFGCIGIDKFGEILKRKAAEAHVDAHYYEQNEQPTGTCAACITGDNRSLIANLAAANCYKKEKHLDLEKNWMLVEKARVCYIAGFFLTVSPESVLKVAHHASENNRIFTLNLSAPFISQFYKESLMKVMPYVDILFGNETEAATFAREQGFETKDIKEIAKKTQALPKMNSKRQRIVIFTQGRDDTIMATESEVTAFAVLDQDQKEIIDTNGAGDAFVGGFLSQLVSDKPLTECIRAGHYAASIIIRRTGCTFPEKPDFH

SEQ ID NO: 378 - protein, 499 aa, Homo Sapiens
MNGPEDLPKSYDYDLIIIGGGSGGLAAAKEAAQYGKKVMVLDFVTPTPLGTRWGLGGTCVNVGCIPKKLMHQAALLGQALQDSRNYGWKVEETVKHDWDRMIEAVQNHIGSLNWGYRVALREKKVVYENAYGQFIGPHRIKATNNKGKEKIYSAERFLIATGERPRYLGIPGDKEYCISSDDLFSLPYCPGKTLVVGASYVALECAGFLAGIGLDVTVMVRSILLRGFDQDMANKIGEHMEEHGIKFIRQFVPIKVEQIEAGTPGRLRVVAQSTNSEEIIEGEYNTVMLAIGRDACTRKIGLETVGVKINEKTGKIPVTDEEQTNVPYIYAIGDILEDKVELTPVAIQAGRLLAQRLYAGSTVKCDYENVPTTVFTPLEYGACGLSEEKAVEKFGEENIEVYHSYFWPLEWTIPSRDNNKCYAKIICNTKDNERVVGFHVLGPNAGEVTQGFAAALKCGLTKKQLDSTIGIHPVCAEVFTTLSVTKRSGASILQAGCCG

SEQ ID NO: 379 - protein, 661 aa, Homo Sapiens
MASTDYSTYSQAAAQQGYSAYTAQPTQGYAQTTQAYGQQSYGTYGQPTDVSYTQAQTTATYGQTAYATSYGQPPTVEGTSTGYTTPTAPQAYSQPVQGYGTGAYDTTTATVTTTQASYAAQSAYGTQPAYPAYGQQPAATAPTRPQDGNKPTETSQPQSSTGGYNQPSLGYGQSNYSYPQVPGSYPMQPVTAPPSYPPTSYSSTQPTSYDQSSYSQQNTYGQPSSYGQQSSYGQQSSYGQQPPTSYPPQTGSYSQAPSQYSQQSSSYGQQSSFRQDHPSSMGVYGQESGGFSGPGENRSMSGPDNRGRGRGGFDRGGMSRGGRGGGRGGMGAGERGGFNKPGGPMDEGPDLDLGPPVDPDEDSDNSAIYVQGLNDSVTLDDLADFFKQCGVVKMNKRTGQPMIHIYLDKETGKPKGDATVSYEDPPTAKAAVEWFDGKDFQGSKLKVSLARKKPPMNSMRGGLPPREGRGMPPPLRGGPGGPGGPGGPMGRMGGRGGDRGGFPPRGPRGSRGNPSGGGNVQHRAGDWQCPNPGCGNQNFAWRTECNQCKAPKPEGFLPPPFPPPGGDRGRGGPGGMRGGRGGLMDRGGPGGMFRGGRGGDRGGFRGGRGMDRGGFGGGRRGGPGGPPGPLMEQMGGRRGGRGGPGKMDKGEHRQERRDRPY

SEQ ID NO: 380 - protein, 485 aa, Homo Sapiens
MRKRAPQSEMAPAGVSLRATILCLLAWAGLAAGDRVYIHPFHLVIHNESTCEQLAKANAGKPKDPTFIPAPIQAKTSPVDEKALQDQLVLVAAKLDTEDKLRAAMVGMLANFLGFRIYGMHSELWGVVHGATVLSPTAVFGTLASLYLGALDHTADRLQAILGVPWKDKNCTSRLDAHKVLSALQAVQGLLVAQGRADSQAQLLLSTVVGVFTAPGLHLKQPFVQGLALYTPVVLPRSLDFTELDVAAEKIDRFMQAVTGWKTGCSLMGASVDSTLAFNTYVHFQGKMKGFSLLAEPQEFWVDNSTSVSVPMLSGMGTFQHWSDIQDNFSVTQVPFTESACLLLIQPHYASDLDKVEGLTFQQNSLNWMKKLSPRTIHLTMPQLVLQGSYDLQDLLAQAELPAILHTELNLQKLSNDRIRVGEVLNSIFFELEADEREPTESTQQLNKPEVLEVTLNRPFLFAVYDQSATALHFLGRVANPLSTA

SEQ ID NO: 381 - protein, 307 aa, Homo Sapiens
MRRGRAGPGRAGGARSASWMSRLRALLGLGLLVAGSRLPRIKSQTIACRSGPTWWGPQRLNSGGRWDSEVMASTVVKYLSQEEAQAVDQELFNEYQFSVDQLMELAGLSCATAIAKAYPPTSMSRSPPTVLVICGPGNNGGDGLVCARHLKLFGYEPTIYYPKRPNKPLFTALVTQCQKMDIPFLGEMPAEPMTIDELYELVVDAIFGFSFKGDVREPFHSILSVLKGLTVPIASIDIPSGWDVEKGNAGGIQPDLLISLTAPKKSATQFTGRYHYLGGRFVPPALEKKYQLNLPPYPDTECVYRLQ

SEQ ID NO: 382 - protein, 589 aa, Homo Sapiens
MSRRLLPRAEKRRRRLEQRQQPDEQRRRSGAMVKMAAAGGGGGGGRYYGGGSEGGRAPKRLKTDNAGDQHGGGGGGGGGAGAAGGGGGGENYDDPHKTPASPVVHIRGLIDGVVEADLVEALQEFGPISYVVVMPKKRQALVEFEDVLGACNAVNYAADNQIYIAGHPAFVNYSTSQKISRPGDSDDSRSVNSVLLFTILNPIYSITTDVLYTICNPCGPVQRIVIFRKNGVQAMVEFDSVQSAQRAKASLNGADIYSGCCTLKIEYAKPTRLNVFKNDQDTWDYTNPNLSGQGDPGSNPNKRQRQPPLLGDHPAEYGGPHGGYHSHYHDEGYGPPPPHYEGRRMGPPVGGHRRGPSRYGPQYGHPPPPPPPPEYGPHADSPVLMVYGLDQSKMNCDRVFNVFCLYGNVEKVKFMKSKPGAAMVEMADGYAVDRAITHLNNNFMFGQKLNVCVSKQPAIMPGQSYGLEDGSCSYKDFSESRNNRFSTPEQAAKNRIQHPSNVLHFFNAPLEVTEENFFEICDELGVKRPSSVKVFSGKSERSSSGLLEWESKSDALETLGFLNHYQMKNPNGPYPYTLKLCFSTAQHAS

SEQ ID NO: 383 - protein, 346 aa, Homo Sapiens
MTATLAAAADIATMVSGSSGLAAARLLSRSFLLPQNGIRHCSYTASRQHLYVDKNTKIICQGFTGKQGTFHSQQALEYGTKLVGGTTPGKGGQTHLGLPVFNTVKEAKEQTGATASVIYVPPPFAAAAINEAIEAEIPLVVCITEGIPQQDMVRVKHKLLRQEKTRLIGPNCPGVINPGECKIGIMPGHIHKKGRIGIVSRSGTLTYEAVHQTTQVGLGQSLCVGIGGDPFNGTDFIDCLEIFLNDSATEGIILIGEIGGNAEENAAEFLKQHNSGPNSKPVVSFIAGLTAPPGRRMGHAGAIIAGGKGGAKEKISALQSAGVVVSMSPAQLGTTIYKEFEKRKML

SEQ ID NO: 384 - protein, 241 aa, Homo Sapiens
MGGTTSTRRVTFEADENENITVVKGIRLSENVIDRMKESSPSGSKSQRYSGAYGASVSDEELKRRVAEELALEQAKKESEDQKREETSETALRKFCVQSFSSNFLESQNMYTLLLKQAKELDRERAAANEQLTRAILRERICSEEERAKAKHLARQLEEKDRVLKKQDAFYKEQLARLEERSSEFYRVTTEQYQKAAEEVEAKFKFGEMKYHKTGLFILLPLVPVWLLVGELVTSPSFQAT

SEQ ID NO: 385 - protein, 238 aa, Homo Sapiens
MVGPRSWETGRIGDERQEETGGGRGEGRGRRQRESEDPKGWRWGWKDWGPAGKRVCSLKQEFVGQSLWVRVCGAGIETRGIGVQMLTTSLFSEQCDFTEDQTAEFKEAFQLFDRTGDGKILYSQCGDVMRALGQNPTNAEVLKVLGNPKSDEMNVKVLDFEHFLPMLQTVAKNKDQGTYEDYVEGLRVFDKEGNGTVMGAEIRHVLVTLGEKMTEEEVEMLVAGHEDSNGCINYEGKR

SEQ ID NO: 386 - protein, 373 aa, Homo Sapiens
MTTSASSHLNKGIKQVYMSLPQGEKVQAMYIWIDGTGEGLRCKTRTLDSEPKCVEELPEWNFDGSSTLQSEGSNSDMYLVPAAMFRDPFRKDPNKLVLCEVFKYNRRPAETNLRHTCKRIMDMVSNQHPWFGMEQEYTLMGTDGHPFGWPSNGFPGPQGPYYCGVGADRAYGRDIVEAHYRACLYAGVKIAGTNAEVMPAQWEFQIGPCEGISMGDHLWVARFILHRVCEDFGVIATFDPKPIPGNWNGAGCHTNFSTKAMREENGLKYIEEAIEKLSKRHQYHIRAYDPKGGLDNARRLTGFHETSNINDFSAGVANRSASIRIPRTVGQEKKGYFEDRRPSANCDPFSVTEALIRTCLLNETGDEPFQYKN

SEQ ID NO: 387 - protein, 271 aa, Homo Sapiens
MASADSRRVADGGGAGGTFQPYLDTLRQELQQTDPTLLSVVVAVLAVLLTLVFWKLIRSRRSSQRAVLLVGLCDSGKTLLFVRLLTGLYRDTQTSITDSCAVYRVNNNRGNSLTLIDLPGHESLRLQFLERFKSSARAIVFVVDSAAFQREVKDVAEFLYQVLIDSMGLKNTPSFLIACNKQDIAMAKSAKLIQQQLEKELNTLRVTRSAAPSTLDSSSTAPAQLGKKGKEFEFSQLPLKVEFLECSAKGGRGDVGSADIQDLEKWLAKIA

SEQ ID NO: 388 - protein, 403 aa, Homo Sapiens
MAIPGIPYERRLLIMADPRDKALQDYRKKLLEHKEIDGRLKELREQLKELTKQYEKSENDLKALQSVGQIVGEVLKQLTEEKFIVKATNGPRYVVGCRRQLDKSKLKPGTRVALDMTTLTIMRYLPREVDPLVYNMSHEDPGNVSYSEIGGLSEQIRELREVIELPLTNPELFQRVGIIPPKGCLLYGPPGTGKTLLARAVASQLDCNFLKVVSSSIVDKYIGESARLIREMFNYARDHQPCIIFMDEIDAIGGRRFSEGTSADREIQRTLMELLNQMDGFDTLHRVKMIMATNRPDTLDPALLRPGRLDRKIHIDLPNEQARLDILKIHAGPITKHGEIDYEAIVKLSDGFNGADLRNVCTEAGMFAIRADHDFVVQEDFMKAVRKVADSKKLESKLDYKPV

SEQ ID NO: 389 - protein, 95 aa, Homo Sapiens
MTELETAMGMIIDVFSRYSGSEGSTQTLTKGELKVLMEKELPGFLQSGKDKDAVDKLLKDLDANGDAQVDFSEFIVFVAAITSACHKYFEKAGLK

SEQ ID NO: 390 - protein, 315 aa, Homo Sapiens
MPRPARKFRRLVALRGRYSLCPKPRPLSPCLPNPDCFLGWGRGYGARRSQVEAVPRSALTKLRHFRRVRLASARCTMAALKSWLSRSVTSFFRYRQCLCVPVVANFKKRCFSELIRPWHKTVTIGFGVTLCAVPIAQKSEPHSLSSEALMRRAVSLVTDSTSTFLSQTTYALIEAITEYTKAVYTLTSLYRQYTSLLGKMNSEEEDEVWQVIIGARAEMTSKHQEYLKLETTWMTAVGLSEMAAEAAYQTGADQASITARNHIQLVKLQVEEVHQLSRKAETKLAEAQIEELRQKTQEEGEERAESEQEAYLRED

SEQ ID NO: 391 - protein, 356 aa, Homo Sapiens
MAAEGWIWRWGWGRRCLGRPGLLGPGPGPTTPLFLLLLLGSVTADITDGNSEHLKREHSLIKPYQGVGSSSMPLWDFQGSTMLTSQYVRLTPDERSKEGSIWNHQPCFLKDWEMHVHFKVHGTGKKNLHGDGIALWYTRDRLVPGPVFGSKDNFHGLAIFLDTYPNDETTERVFPYISVMVNNGSLSYDHSKDGRWTELAGCTADFRNRDHDTFLAVRYSRGRLTVMTDLEDKNEWKNCIDITGVRLPTGYYFGASAGTGDLSDNHDIISMKLFQLMVEHTPDEESIDWTKIEPSVNFLKSPKDNVDDPTGNFRSGPLTGWRVFLLLLCALLGIVVCAVVGAVVFQKRQERNKRFY

SEQ ID NO: 392 - protein, 366 aa, Homo Sapiens
MAGPAWISKVSRLLGAFHNPKQVTRGFTGGVQTVTLIPGDGIGPEISAAVMKIFDAAKAPIQWEERNVTAIQGPGGKWMIPSEAKESMDKNKMGLKGPLKTPIAAGHPSMNLLLRKTFDLYANVRPCVSIEGYKTPYTDVNIVTIRENTEGEYSGIEHVIVDGVVQSIKLITEGASKRIAEFAFEYARNNHRSNVTAVHKANIMRMSDGLFLQKCREVAESCKDIKFNEMYLDTVCLNMVQDPSQFDVLVMPNLYGDILSDLCAGLIGGLGVTPSGNIGANGVAIFESVHGTAPDIAGKDMANPTALLLSAVMMLRHMGLFDHAARIEAACFATIKDGKSLTKDLGGNAKCSDFTEEICRRVKDLD

SEQ ID NO: 393 - protein, 408 aa, Homo Sapiens
MAENGDNEKMAALEAKICHQIEYYFGDFNLPRDKFLKEQIKLDEGWVPLEIMIKFNRLNRLTTDFNVIVEALSKSKAELMEISEDKTKIRRSPSKPLPEVTDEYKNDVKNRSVYIKGFPTDATLDDIKEWLEDKGQVLNIQMRRTLHKAFKGSIFVVFDSIESAKKFVETPGQKYKETDLLILFKDDYFAKKNEERKQNKVEAKLRAKQEQEAKQKLEEDAEMKSLEEKIGCLLKFSGDLDDQTCREDLHILFSNHGEIKWIDFVRGAKEGIILFKEKAKEALGKAKDANNGNLQLRNKEVTWEVLEGEVEKEALKKIIEDQQESLNKWKSKGRRFKGKGKGNKAAQPGSGKGKVQFQGKKTKFASDDEHDEHDENGATGPVKRAREETDKEEPASKQQKTENGAGDQ

SEQ ID NO: 394 - protein, 415 aa, Homo Sapiens
MMLGPEGGEGFVVKLRGLPWSCSVEDVQNFLSDCTIHDGAAGVHFIYTREGRQSGEAFVELGSEDDVKMALKKDRESMGHRYIEVFKSHRTEMDWVLKHSGPNSADSANDGFVRLRGLPFGCTKEEIVQFFSGLEIVPNGITLPVDPEGKITGEAFVQFASQELAEKALGKHKERIGHRYIEVFKSSQEEVRSYSDPPLKFMSVQRPGPYDRPGTARRYIGIVKQAGLERMRPGAYSTGYGGYEEYSGLSDGYGFTTDLFGRDLSYCLSGMYDHRYGDSEFTVQSTTGHCVHMRGLPYKATENDIYNFFSPLNPVRVHIEIGPDGRVTGEADVEFATHEEAVAAMSKDRANMQHRYIELFLNSTTGASNGAYSSQVMQGMGVSAAQATYSGLESQSVSGCYGAGYSGQNSMGGYD

SEQ ID NO: 395 - protein, 128 aa, Homo Sapiens
MTEADVNPKAYPLADAHLTKKLLDLVQQSCNYKQLRKGANEATKTLNRGISEFIVMAADAEPLEIILHLPLLCEDKNVPYVFVRSKQALGRACGVSRPVIACSVTIKEGSQLKQQIQSIQQSIERLLV

SEQ ID NO: 396 - protein, 1555 aa, Homo Sapiens
MGCKGDASGACAAGALPVTGVCYKMGVLVVLTVLWLFSSVKADSKAITTSLTTKWFSTPLLLEASEFLAEDSQEKFWNFVEASQNIGSSDHDGTDYSYYHAILEAAFQFLSPLQQNLFKFCLSLRSYSATIQAFQQIAADEPPPEGCNSFFSVHGKKTCESDTLEALLLTASERPKPLLFKGDHRYPSSNPESPVVIFYSEIGSEEFSNFHRQLISKSNAGKINYVFRHYIFNPRKEPVYLSGYGVELAIKSTEYKAKDDTQVKGTEVNTTVIGENDPIDEVQGFLFGKLRDLHPDLEGQLKELRKHLVESTNEMAPLKVWQLQDLSFQTAARILASPVELALVVMKDLSQNFPTKARAITKTAVSSELRTEVEENQKYFKGTLGLQPGDSALFINGLHMDLDTQDIFSLFDVLRNEARVMEGLHRLGIEGLSLHNVLKLNIQPSEADYAVDIRSPAISWVNNLEVDSRYNSWPSSLQELLRPTFPGVIRQIRKNLHNMVFIVDPAHETTAELMNTAEMFLSNHIPLRIGFIFVVNDSEDVDGMQDAGVAVLRAYNYVAQEVDDYHAFQTLTHIYNKVRTGEKVKVEHVVSVLEKKYPYVEVNSILGIDSAYDRNRKEARGYYEQTGVGPLPVVLFNGMPFEREQLDPDELETITMHKILETTTFFQRAVYLGELPHDQDVVEYIMNQPNVVPRINSRILTAERDYLDLTASNNFFVDDYARFTILDSQGKTAAVANSMNYLTKKGMSSKEIYDDSFIRPVTFWIVGDFDSPSGRQLLYDAIKHQKSSNNVRISMINNPAKEISYENTQISRAIWAALQTQTSNAAKNFITKMAKEGAAEALAAGADIAEFSVGGMDFSLFKEVFESSKMDFILSHAVYCRDVLKLKKGQRAVISNGRIIGPLEDSELFNQDDFHLLENIILKTSGQKIKSHIQQLRVEEDVASDLVMKVDALLSAQPKGDPRIEYQFFEDRHSAIKLRPKEGETYFDVVAVVDPVTREAQRLAPLLLVLAQLINMNLRVFMNCQSKLSDMPLKSFYRYVLEPEISFTSDNSFAKGPIAKFLDMPQSPLFTLNLNTPESWMVESVRTPYDLDNIYLEEVDSVVAAEYELEYLLLEGHCYDITTGQPPRGLQFTLGTSANPVIVDTIVMANLGYFQLKANPGAWILRLRKGRSEDIYRIYSHDGTDSPPDADEVVIVLNNFKSKIIKVKVQKKADMVNEDLLSDGTSENESGFWDSFKWGFTGQKTEEVKQDKDDIINIFSVASGHLYERFLRIMMLSVLKNTKTPVKFWFLKNYLSPTFKEFIPYMANEYNFQYELVQYKWPRWLHQQTEKQRIIWGYKILFLDVLFPLVVDKFLFVDADQIVRTDLKELRDFNLDGAPYGYTPFCDSRREMDGYRFWKSGYWASHLAGRKYHISALYVVDLKKFRKIAAGDRLRGQYQGLSQDPNSLSNLDQDLPNNMIHQVPIKSLPQEWLWCETWCDDASKKRAKTIDLCNNPMTKEPKLEAAVRIVPEWQDYDQEIKQLQIRFQKEKETGALYKEKTKEPSREGPQKREEL

SEQ ID NO: 397 - protein, 240 aa, Homo Sapiens
MTVGKSSKMLQHIDYRMRCILQDGRIFIGTFKAFDKHMNLILCDCDEFRKIKPKNSKQAEREEKRVLGLVLLRGENLVSMTVEGPPPKDTGIARVPLAGAAGGPGIGRAAGRGIPAGVPMPQAPAGLAGPVRGVGGPSQQVMTPQGRGTVAAAAAAATASIAGAPTQYPPGRGGPPPPMGRGAPPPGMMGPPPGMRPPMGPPMGIPPGRGTPMGMPPPGMRPPPPGMRGPPPPGMRPPRP

SEQ ID NO: 398 - protein, 690 aa, Homo Sapiens
MRPMRIFVNDDRHVMAKHSSVYPTQEELEAVQNMVSHTERALKAVSDWIDEQEKGSSEQAESDNMDVPPEDDSKEGAGEQKTEHMTRTLRGVMRVGLVAKGLLLKGDLDLELVLLCKEKPTTALLDKVADNLAIQLAAVTEDKYEILQSVDDAAIVIKNTKEPPLSLTIHLTSPVVREEMEKVLAGETLSVNDPPDVLDRQKCLAALASLRHAKWFQARANGLKSCVIVIRVLRDLCTRVPTWGPLRGWPLELLCEKSIGTANRPMGAGEALRRVLECLASGIVMPDGSGIYDPCEKEATDAIGHLDRQQREDITQSAQHALRLAAFGQLHKVLGMDPLPSKMPKKPKNENPVDYTVQIPPSTTYAITPMKRPMEEDGEEKSPSKKKKKIQKKEEKAEPPQAMNALMRLNQLKPGLQYKLVSQTGPVHAPIFTMSVEVDGNSFEASGPSKKTAKLHVAVKVLQDMGLPTGAEGRDSSKGEDSAEETEAKPAVVAPAPVVEAVSTPSAAFPSDATAEQGPILTKHGKNPVMELNEKRRGLKYELISETGGSHDKRFVMEVEVDGQKFQGAGSNKKVAKAYAALAALEKLFPDTPLALDANKKKRAPVPVRGGPKFAAKPHNPGFGMGGPMHNEVPPPPNLRGRGRGGSIRGRGRGRGFGGANHGGYMNAGAGYGSYGYGGNSATAGYTGFV

SEQ ID NO: 399 - protein, 170 aa, Homo Sapiens
MPGEVQASYLKSQSKLSDEGRLEPRKFHCKGVKVPRNFRLLEELEEGQKGVGDGTVSWGLEDDEDMTLTRWTGMIIGPPRTIYENRIYSLKIECGPKYPEAPPFVRFVTKINMNGVNSSNGVVDPRAISVLAKWQNSYSIKVVLQELRRLMMSKENMKLPQPPEGQCYSN

SEQ ID NO: 400 - protein, 348 aa, Homo Sapiens
MNMTQARVLVAAVVGLVAVLLYASIHKIEEGHLAVYYRGGALLTSPSGPGYHIMLPFITTFRSVQTTLQTDEVKNVPCGTSGGVMIYIDRIEVVNMLAPYAVFDIVRNYTADYDKTLIFNKIHHELNQFCSAHTLQEVYIELFDQIDENLKQALQKDLNLMAPGLTIQAVRVTKPKIPEAIRRNFELMEAEKTKLLIAAQKQKVVEKEAETERKKAVIEAEKIAQVAKIRFQQKVMEKETEKRISEIEDAAFLAREKAKADAEYYAAHKYATSNKHKLTPEYLELKKYQAIASNSKIYFGSNIPNMFVDSSCALKYSDIRTGRESSLPSKEALEPSGENVIQNKESTG

SEQ ID NO: 401 - protein, 454 aa, Homo Sapiens
MPEFLEDPSVLTKDKLKSELVANNVTLPAGEQRKDVYVQLYLQHLTARNRPPLPAGTNSKGPPDFSSDEEREPTPVLGSGAAAAGRSRAAVGRKATKKTDKPRQEDKDDLDVTELTNEDLLDQLVKYGVNPGPIVGTTRKLYEKKLLKLREQGTESRSSTPLPTISSSAENTRQNGSNDSDRYSDNEEDSKIELKLEKREPLKGRAKTPVTLKQRRVEHNQSYSQAGITETEWTSGSSKGGPLQALTRESTRGSRRTPRKRVETSEHFRIDGPVISESTPIAETIMASSNESLVVNRVTGNFKHASPILPITEFSDIPRRAPKKPLTRAEVGEKTEERRVERDILKEMFPYEASTPTGISASCRRPIKGAAGRPLELSDFRMEESFSSKYVPKYVPLADVKSEKTKKGRSIPVWIKILLFVVVAVFLFLVYQAMETNQVNPFSNFLHVDPRKSN

SEQ ID NO: 402 - protein, 876 aa, Homo Sapiens
MELITILEKTVSPDRLELEAAQKFLERAAVENLPTFLVELSRVLANPGNSQVARVAAGLQIKNSLTSKDPDIKAQYQQRWLAIDANARREVKNYVLQTLGTETYRPSSASQCVAGIACAEIPVNQWPELIPQLVANVTNPNSTEHMKESTLEAIGYICQDIDPEQLQDKSNEILTAIIQGMRKEEPSNNVKLAATNALLNSLEFTKANFDKESERHFIMQVVCEATQCPDTRVRVAALQNLVKIMSLYYQYMETYMGPALFAITIEAMKSDIDEVALQGIEFWSNVCDEEMDLAIEASEAAEQGRPPEHTSKFYAKGALQYLVPILTQTLTKQDENDDDDDWNPCKAAGVCLMLLATCCEDDIVPHVLPFIKEHIKNPDWRYRDAAVMAFGCILEGPEPSQLKPLVIQAMPTLIELMKDPSVVVRDTAAWTVGRICELLPEAAINDVYLAPLLQCLIEGLSAEPRVASNVCWAFSSLAEAAYEAADVADDQEEPATYCLSSSFELIVQKLLETTDRPDGHQNNLRSSAYESLMEIVKNSAKDCYPAVQKTTLVIMERLQQVLQMESHIQSTSDRIQFNDLQSLLCATLQNVLRKVQHQDALQISDVVMASLLRMFQSTAGSGGVQEDALMAVSTLVEVLGGEFLKYMEAFKPFLGIGLKNYAEYQVCLAAVGLVGDLCRALQSNIIPFCDEVMQLLLENLGNENVHRSVKPQILSVFGDIALAIGGEFKKYLEVVLNTLQQASQAQVDKSDYDMVDYLNELRESCLEAYTGIVQGLKGDQENVHPDVMLVQPRVEFILSFIDHIAGDEDHTDGVVACAAGLIGDLCTAFGKDVLKLVEARPMIHELLTEGRRSKTNKAKTLATWATKELRKLKNQA

SEQ ID NO: 403 - protein, 840 aa, Homo Sapiens
MSVVGIDLGFQSCYVAVARAGGIETIANEYSDRCTPACISFGPKNRSIGAAAKSQVISNAKNTVQGFKRFHGRAFSDPFVEAEKSNLAYDIVQLPTGLTGIKVTYMEEERNFTTEQVTAMLLSKLKETAESVLKKPVVDCVVSVPCFYTDAERRSVMDATQIAGLNCLRLMNETTAVALAYGIYKQDLPALEEKPRNVVFVDMGHSAYQVSVCAFNRGKLKVLATAFDTTLGGRKFDEVLVNHFCEEFGKKYKLDIKSKIRALLRLSQECEKLKKLMSANASDLPLSIECFMNDVDVSGTMNRGKFLEMCNDLLARVEPPLRSVLEQTKLKKEDIYAVEIVGGATRIPAVKEKISKFFGKELSTTLNADEAVTRGCALQCAILSPAFKVREFSITDVVPYPISLRWNSPAEEGSSDCEVFSKNHAAPFSKVLTFYRKEPFTLEAYYSSPQDLPYPDPAIAQFSVQKVTPQSDGSSSKVKVKVRVNVHGIFSVSSASLVEVHKSEENEEPMETDQNAKEEEKMQVDQEEPHVEEQQQQTPAENKAESEEMETSQAGSKDKKMDQPPQAKKAKVKTSTVDLPIENQLLWQIDREMLNLYIENEGKMIMQDKLEKERNDAKNAVEEYVYEMRDKLSGEYEKFVSEDDRNSFTLKLEDTENWLYEDGEDQPKQVYVDKLAELKNLGQPIKIRFQESEERPKLFEELGKQIQQYMKIISSFKNKEDQYDHLDAADMTKVEKSTNEAMEWMNNKLNLQNKQSLTMDPVVKSKEIEAKIKELTSTCSPIISKPKPKVEPPKEEQKNAEQNGPVDGQGDNPGPQAAEQGTDTAVPSDSDKKLPEMDID

SEQ ID NO: 404 - protein, 1264 aa, Homo Sapiens
MSTLYVSPHPDAFPSLRALIAARYGEAGEGPGWGGAHPRICLQPPPTSRTPFPPPRLPALEQGPGGLWVWGATAVAQLLWPAGLGGPGGSRAAVLVQQWVSYADTELIPAACGATLPALGLRSSAQDPQAVLGALGRALSPLEEWLRLHTYLAGEAPTLADLAAVTALLLPFRYVLDPPARRIWNNVTRWFVTCVRQPEFRAVLGEVVLYSGARPLSHQPGPEAPALPKTAAQLKKEAKKREKLEKFQQKQKIQQQQPPPGEKKPKPEKREKRDPGVITYDLPTPPGEKKDVSGPMPDSYSPRYVEAAWYPWWEQQGFFKPEYGRPNVSAANPRGVFMMCIPPPNVTGSLHLGHALTNAIQDSLTRWHRMRGETTLWNPGCDHAGIATQVVVEKKLWREQGLSRHQLGREAFLQEVWKWKEEKGDRIYHQLKKLGSSLDWDRACFTMDPKLSAAVTEAFVRLHEEGIIYRSTRLVNWSCTLNSAISDIEVDKKELTGRTLLSVPGYKEKVEFGVLVSFAYKVQGSDSDEEVVVATTRIETMLGDVAVAVHPKDTRYQHLKGKNVIHPFLSRSLPIVFDEFVDMDFGTGAVKITPAHDQNDYEVGQRHGLEAISIMDSRGALINVPPPFLGLPRFEARKAVLVALKERGLFRGIEDNPMVVPLCNRSKDVVEPLLRPQWYVRCGEMAQAASAAVTRGDLRILPEAHQRTWHAWMDNIREWCISRQLWWGHRIPAYFVTVSDPAVPPGEDPDGRYWVSGRNEAEAREKAAKEFGVSPDKISLQQDEDVLDTWFSSGLFPLSILGWPNQSEDLSVFYPGTLLETGHDILFFWVARMVMLGLKLTGRLPFREVYLHAIVRDAHGRKMSKSLGNVIDPLDVIYGISLQGLHNQLLNSNLDPSEVEKAKEGQKADFPAGIPECGTDALRFGLCAYMSQGRDINLDVNRILGYRHFCNKLWNATKFALRGLGKGFVPSPTSQPGGHESLVDRWIRSRLTEAVRLSNQGFQAYDFPAVTTAQYSFWLYELCDVYLECLKPVLNGVDQVAAECARQTLYTCLDVGLRLLSPFMPFVTEELFQRLPRRMPQAPPSLCVTPYPEPSECSWKDPEAEAALELALSITRAVRSLRADYNLTRIRPDCFLEVADEATGALASAVSGYVQALASAGVVAVLALGAPAPQGCAVALASDRCSIHLQLQGLVDPARELGKLQAKRVEAQRQAQRLRERRAASGYPVKVPLEVQEADEAKLQQTEAELRKVDEAIALFQKML

SEQ ID NO: 405 - protein, 1014 aa, Homo Sapiens
MAESSDKLYRVEYAKSGRASCKKCSESIPKDSLRMAIMVQSPMFDGKVPHWYHFSCFWKVGHSIRHPDVEVDGFSELRWDDQQKVKKTAEAGGVTGKGQDGIGSKAEKTLGDFAAEYAKSNRSTCKGCMEKIEKGQVRLSKKMVDPEKPQLGMIDRWYHPGCFVKNREELGFRPEYSASQLKGFSLLATEDKEALKKQLPGVKSEGKRKGDEVDGVDEVAKKKSKKEKDKDSKLEKALKAQNDLIWNIKDELKKVCSTNDLKELLIFNKQQVPSGESAILDRVADGMVFGALLPCEECSGQLVFKSDAYYCTGDVTAWTKCMVKTQTPNRKEWVTPKEFREISYLKKLKVKKQDRIFPPETSASVAATPPPSTASAPAAVNSSASADKPLSNMKILTLGKLSRNKDEVKAMIEKLGGKLTGTANKASLCISTKKEVEKMNKKMEEVKEANIRVVSEDFLQDVSASTKSLQELFLAHILSPWGAEVKAEPVEVVAPRGKSGAALSKKSKGQVKEEGINKSEKRMKLTLKGGAAVDPDSGLEHSAHVLEKGGKVFSATLGLVDIVKGTNSYYKLQLLEDDKENRYWIFRSWGRVGTVIGSNKLEQMPSKEDAIEHFMKLYEEKTGNAWHSKNFTKYPKKFYPLEIDYGQDEEAVKKLTVNPGTKSKLPKPVQDLIKMIFDVESMKKAMVEYEIDLQKMPLGKLSKRQIQAAYSILSEVQQAVSQGSSDSQILDLSNRFYTLIPHDFGMKKPPLLNNADSVQAKVEMLDNLLDIEVAYSLLRGGSDDSSKDPIDVNYEKLKTDIKVVDRDSEEAEIIRKYVKNTHATTHNAYDLEVIDIFKIEREGECQRYKPFKQLHNRRLLWHGSRTTNFAGILSQGLRIAPPEAPVTGYMFGKGIYFADMVSKSANYCHTSQGDPIGLILLGEVALGNMYELKHASHISKLPKGKHSVKGLGKTTPDPSANISLDGVDVPLGTGISSGVNDTSLLYNEYIVYDIAQVNLKYLLKLKFNFKTSLW

SEQ ID NO: 406 - protein, 264 aa, Homo Sapiens [sequence omitted]

SEQ ID NO: 407 - protein, 592 aa, Homo Sapiens
MAPGQLALFSVSDKTGLVEFARNLTALGLNLVASGGTAKALRDAGLAVRDVSELTGFPEMLGGRVKTLHPAVHAGILARNIPEDNADMARLDFNLIRVVACNLYPFVKTVASPGVTVEEAVEQIDIGGVTLLRAAAKNHARVTVVCEPEDYVVVSTEMQSSESKDTSLETRRQLALKAFTHTAQYDEAISDYFRKQYSKGVSQMPLRYGMNPHQTPAQLYTLQPKLPITVLNGAPGFINLCDALNAWQLVKELKEALGIPAAASFKHVSPAGAAVGIPLSEDEAKVCMVYDLYKTLTPISAAYARARGADRMSSFGDFVALSDVCDVPTAKIISREVSDGIIAPGYEEEALTILSKKKNGNYCVLQMDQSYKPDENEVRTLFGLHLSQKRNNGVVDKSLFSNVVTKNKDLPESALRDLIVATIAVKYTQSNSVCYAKNGQVIGIGAGQQSRIHCTRLAGDKANYWWLRHHPQVLSMKFKTGVKRAEISNAIDQYVTGTIGEDEDLIKWKALFEEVPELLTEAEKKEWVEKLTEVSISSDAFFPFRDNVDRAKRSGVAYIAAPSGSAADKVVIEACDELGIILAHTNLRLFHH

SEQ ID NO: 408 - protein, 464 aa, Homo Sapiens
MLATRRLLGWSLPARVSVRFSGDTTAPKKTSFGSLKDEDRIFTNLYGRHDWRLKGSLSRGDWYKTKEILLKGPDWILGEIKTSGLRGRGGAGFPTGLKWSFMNKPSDGRPKYLVVNADEGEPGTCKDREILRHDPHKLLEGCLVGGRAMGARAAYIYIRGEFYNEASNLQVAIREAYEAGLIGKNACGSGYDFDVFVVRGAGAYICGEETALIESIEGKQGKPRLKPPFPADVGVFGCPTTVANVETVAVSPTICRRGGTWFAGFGRERNSGTKLFNISGHVNHPCTVEEEMSVPLKELIEKHAGGVTGGWDNLLAVIPGGSSTPLIPKSVCETVLMDFDALVQAQTGLGTAAVIVMDRSTDIVKAIARLIEFYKHESCGQCTPCREGVDWMNKVMARFVRGDARPAEIDSLWEISKQIEGHTICALGDGAAWPVQGLIRHFRPELEERMQRFAQQHQARQAAS

SEQ ID NO: 409 - protein, 505 aa, Homo Sapiens
MSRSYNDELQFLEKINKNCWRIKKGFVPNMQVEGVFYVNDALEKLMFEELRNACRGGGVGGFLPAMKQIGNVAALPGIVHRSIGLPDVHSGYGFAIGNMAAFDMNDPEAVVSPGGVGFDINCGVRLLRTNLDESDVQPVKEQLAQAMFDHIPVGVGSKGVIPMNAKDLEEALEMGVDWSLREGYAWAEDKEHCEEYGRMLQADPNKVSARAKKRGLPQLGTLGAGNHYAEIQVVDEIFNEYAAKKMGIDHKGQVCVMIHSGSRGLGHQVATDALVAMEKAMKRDKIIVNDRQLACARIASPEGQDYLKGMAAAGNYAWVNRSSMTFLTRQAFAKVFNTTPDDLDLHVIYDVSHNIAKVEQHVVDGKERTLLVHRKGSTRAFPPHHPLIAVDYQLTGQPVLIGGTMGTCSYVLTGTEQGMTETFGTTCHGAGRALSRAKSRRNLDFQDVLDKLADMGIAIRVASPKLVMEEAPESYKNVTDVVNTCHDAGISKKAIKLRPIAVIKG

SEQ ID NO: 410 - protein, 814 aa, Homo Sapiens
MQDAENVAVPEAAEERAEPGQQQPAAEPPPAEGLLRPAGPGAPEAAGTEASSEEVGIAEAGPESEVRTEPAAEAEAASGPSESPSPPAAEELPGSHAEPPVPAQGEAPGEQARDERSDSRAQAVSEDAGGNEGRAAEAEPRALENGDADEPSFSDPEDFVDDVSEEELLGDVLKDRPQEADGIDSVIVVDNVPQVGPDRLEKLKNVIHKIFSKFGKITNDFYPEEDGKTKGYIFLEYASPAHAVDAVKNADGYKLDKQHTFRVNLFTDFDKYMTISDEWDIPEKQPFKDLGNLRYWLEEAECRDQYSVIFESGDRTSIFWNDVKDPVSIEERARWTETYVRWSPKGTYLATFHQRGIALWGGEKFKQIQRFSHQGVQLIDFSPCERYLVTFSPLMDTQDDPQAIIIWDILTGHKKRGFHCESSAHWPIFKWSHDGKFFARMTLDTLSIYETPSMGLLDKKSLKISGIKDFSWSPGGNIIAFWVPEDKDIPARVTLMQLPTRQEIRVRNLFNVVDCKLHWQKNGDYLCVKVDRTPKGTQGVVTNFEIFRMREKQVPVDVVEMKETIIAFAWEPNGSKFAVLHGEAPRISVSFYHVKNNGKIELIKMFDKQQANTIFWSPQGQFVVLAGLRSMNGALAFVDTSDCTVMNIAEHYMASDVEWDPTGRYVVTSVSWWSHKVDNAYWLWTFQGRLLQKNNKDRFCQLLWRPRPPTLLSQEQIKQIKKDLKKYSKIFEQKDRLSQSKASKELVERRRTMMEDFRKYRKMAQELYMEQKNERLELRGGVDTDELDSNVDDWEEETIEFFVTEEIIPLGNQE

SEQ ID NO: 411 - protein, 608 aa, Homo Sapiens
MAASKPVEAAVVAAAVPSSGSGVGGGGTAGPGTGGLPRWQLALAVGAPLLLGAGAIYLWSRQQRRREARGRGDASGLKRNSERKTPEGRASPAPGSGHPEGPGAHLDMNSLDRAQAAKNKGNKYFKAGKYEQAIQCYTEAISLCPTEKNVDLSTFYQNRAAAFEQLQKWKEVAQDCTKAVELNPKYVKALFRRAKAHEKLDNKKECLEDVTAVCILEGFQNQQSMLLADKVLKLLGKEKAKEKYKNREPLMPSPQFIKSYFSSFTDDIISQPMLKGEKSDEDKDKEGEALEVKENSGYLKAKQYMEEENYDKIISECSKEIDAEGKYMAEALLLRATFYLLIGNANAAKPDLDKVISLKEANVKLRANALIKRGSMYMQQQQPLLSTQDFNMAADIDPQNADVYHHRGQLKILLDQVEEAVADFDECIRLRPESALAQAQKCFALYRQAYTGNNSSQIQAAMKGFEEVIKKFPRCAEGYALYAQALTDQQQFGKADEMYDKCIDLEPDNATTYVHKGLLQLQWKQDLDRGLELISKAIEIDNKCDFAYETMGTIEVQRGNMEKAIDMFNKAINLAKSEMEMAHLYSLCDAAHAQTEVAKKYGLKPPTL

SEQ ID NO: 412 - protein, 145 aa, Homo Sapiens
MGRQRAEGLGRAVEPPPGRCWSTPPVAPPARSASAAAMGVQVETISPGDGRTFPKRGQTCVVHYTGMLEDGKKFDSSRDRNKPFKFMLGKQEVIRGWEEGVAQMSVGQRAKLTISPDYAYGATGHPGIIPPHATLVFDVELLKLE

SEQ ID NO: 413 - protein, 231 aa, Homo Sapiens
MAGKKVLIVYAHQEPKSFNGSLKNVAVDELSRQGCTVTVSDLYAMNLEPRATDKDITGTLSNPEVFNYGVETHEAYKQRSLASDITDEQKKVREADLVIFQFPLYWFSVPAILKGWMDRVLCQGFAFDIPGFYDSGLLQGKLALLSVTTGGTAEMYTKTGVNGDSRYFLWPLQHGTLHFCGFKVLAPQISFAPEIASEEERKGMVAAWSQRLQTIWKEEPIPCTAHWHFGQ

SEQ ID NO: 414 - protein, 244 aa, Homo Sapiens
  misc_feature (1)..(1): Xaa can be any naturally occurring amino acid
XQDLPAIQPRLVAVSKTKPADMVIEAYGHGQRTFGENYVQELLEKASNPKILSLCPEIKWHFIGHLQKQNVNKLMAVPNLFMLETVDSVKLADKVNSSWQRKGSPERLKVMVQINTSGEESKHGLPPSETIAIVEHINAKCPNLEFVGLMTIGSFGHDLSQGPNPDFQLLLSLREELCKKLNIPADQVELSMGMSADFQHAVEVGSTNVRIGSTIFGERDYSKKPTPDKCAADVKAPLEVAQEH

SEQ ID NO: 415 - protein, 182 aa, Homo Sapiens [sequence omitted]

SEQ ID NO: 416 - protein, 737 aa, Homo Sapiens
MADTQYILPNDIGVSSLDCREAFRLLSPTERLYAYHLSRAAWYGGLAVLLQTSPEAPYIYALLSRLFRAQDPDQLRQHALAEGLTEEEYQAFLVYAAGVYSNMGNYKSFGDTKFVPNLPKEKLERVILGSEAAQQHPEEVRGLWQTCGELMFSLEPRLRHLGLGKEGITTYFSGNCTMEDAKLAQDFLDSQNLSAYNTRLFKEVDGEGKPYYEVRLASVLGSEPSLDSEVTSKLKSYEFRGSPFQVTRGDYAPILQKVVEQLEKAKAYAANSHQGQMLAQYIESFTQGSIEAHKRGSRFWIQDKGPIVESYIGFIESYRDPFGSRGEFEGFVAVVNKAMSAKFERLVASAEQLLKELPWPPTFEKDKFLTPDFTSLDVLTFAGSGIPAGINIPNYDDLRQTEGFKNVSLGNVLAVAYATQREKLTFLEEDDKDLYILWKGPSFDVQVGLHELLGHGSGKLFVQDEKGAFNFDQETVINPETGEQIQSWYRSGETWDSKFSTIASSYEECRAESVGLYLCLHPQVLEIFGFEGADAEDVIYVNWLNMVRAGLLALEFYTPEAFNWRQAHMQARFVILRVLLEAGEGLVTITPTTGSDGRPDARVRLDRSKIRSVGKPALERFLRRLQVLKSTGDVAGGRALYEGYATVTDAPPECFLTLRDTVLLRKESRKLIVQPNTRLEGSDVQLLEYEASAAGLIRSFSERFPEDGPELEEILTQLATADARFWKGPSEAPSGQA

SEQ ID NO: 417 - protein, 1266 aa, Homo Sapiens
MGPLMVLFCLLFLYPGLADSAPSCPQNVNISGGTFTLSHGWAPGSLLTYSCPQGLYPSPASRLCKSSGQWQTPGATRSLSKAVCKPGHCPNPGISLGAVRTGFRFGHGDKVRYRCSSNLVLTGSSERECQGNGVWSGTEPICRQPYSYDFPEDVAPALGTSFSHMLGATNPTQKTKDHENGTGTNTYAALNSVYLMMNNQMRLLGMETMAWQEIRHAIILLTDGKSNMGGSPKTAVDHIREILNINQKRNDYLDIYAIGVGKLDVDWRELNELGSKKDGERHAFILQDTKALHQVFEHMLDVSKLTDTICGVGNMSANASDQERTPWHVTIKPKSQETCRGALISDQWVLTAAHCFRDGNDHSLWRVNVGDPKSQWGKEFLIEKAVISPGFDVFAKKNQGILEFYGDDIALLKLAQKVKMSTHARPICLPCTMEANLALRRPQGSTCRDHENELLNKQSVPAHFVALNGSKLNINLKMGVEWTSCAEVVSQEKTMFPNLTDVREVVTDQFLCSGTQEDESPCKGVTTTPWSLARPQGSCSLEGVEIKGGSFRLLQEGQALEYVCPSGFYPYPVQTRTCRSTGSWSTLKTQDQKTVRKAECRAIHCPRPHDFENGEYWPRSPYYNVSDEISFHCYDGYTLRGSANRTCQVNGRWSGQTAICDNGAGYCSNPGIPIGTRKVGSQYRLEDSVTYHCSRGLTLRGSQRRTCQEGGSWSGTEPSCQDSFMYDTPQEVAEAFLSSLTETIEGVDAEDGHGPGEQQKRKIVLDPSGSMNIYLVLDGSDSIGASNFTGAKKCLVNLIEKVASYGVKPRYGLVTYATYPKIWVKVSEADSSNADWVTKQLNEINYEDHKLKSGTNTKKALQAVYSMMSWPDDVPPEGWNRTRHVIILMTDGLHNMGGDPITVIDEIRDLLYIGKDRKNPREDYLDVYVFGVGPLVNQVNINALASKKDNEQHVFKVKDMENLEDVFYQMIDESQSLSLCGMVWEHRKGTDYHKQPWQAKISVIRPSKGHESCMGAVVSEYFVLTAAHCFTVDDKEHSIKVSVGGEKRDLEIEVVLFHPNYNINGKKEAGIPEFYDYDVALIKLKNKLKYGQTIRPICLPCTEGTTRALRLPPTTTCQQQKEELLPAQDIKALFVSEEEKKLTRKEVYIKNGDKKGSCERDAQYAPGYDKVKDISEVVTPRFLCTGGVSPYADPNTCRGDSGGPLIVHKRSRFIQVGVISWGVVDVCKNQKRQKQVPAHARDFHINLFQVLPWLKEKLQDEDLGFL

SEQ ID NO: 418 - protein, 299 aa, Homo Sapiens
MSSIKIECVLPENCRCGESPVWEEVSNSLLFVDIPAKKVCRWDSFTKQVQRVTMDAPVSSVALRQSGGYVATIGTKFCALNWKEQSAVVLATVDNDKKNNRFNDGKVDPAGRYFAGTMAEETAPAVLERHQGALYSLFPDHHVKKYFDQVDISNGLDWSLDHKIFYYIDSLSYSVDAFDYDLQTGQISNRRSVYKLEKEEQIPDGMCIDAEGKLWVACYNGGRVIRLDPVTGKRLQTVKLPVDKTTSCCFGGKNYSEMYVTCARDGMDPEGLLRQPEAGGIFKITGLGVKGIAPYSYAG

SEQ ID NO: 419 - protein, 373 aa, Homo Sapiens
MEPAVSEPMRDQVARTHLTEDTPKVNADIEKVNQNQAKRCTVIGGSGFLGQHMVEQLLARGYAVNVFDIQQGFDNPQVRFFLGDLCSRQDLYPALKGVNTVFHCASPPPSSNNKELFYRVNYIGTKNVIETCKEAGVQKLILTSSASVIFEGVDIKNGTEDLPYAMKPIDYYTETKILQERAVLGANDPEKNFLTTAIRPHGIFGPRDPQLVPILIEAARNGKMKFVIGNGKNLVDFTFVENVVHGHILAAEQLSRDSTLGGKAFHITNDEPIPFWTFLSRILTGLNYEAPKYHIPYWVAYYLALLLSLLVMVISPVIQLQPTFTPMRVALAGTFHYYSCERAKKAMGYQPLVTMDDAMERTVQSFRHLRRVK

SEQ ID NO: 420 - protein, 699 aa, Homo Sapiens
MCGIFAYLNYHVPRTRREILETLIKGLQRLEYRGYDSAGVGFDGGNDKDWEANACKIQLIKKKGKVKALDEEVHKQQDMDLDIEFDVHLGIAHTRWATHGEPSPVNSHPQRSDKNNEFIVIHNGIITNYKDLKKFLESKGYDFESETDTETIAKLVKYMYDNRESQDTSFTTLVERVIQQLEGAFALVFKSVHFPGQAVGTRRGSPLLIGVRSEHKLSTDHIPILYRTARTQIGSKFTRWGSQGERGKDKKGSCNLSRVDSTTCLFPVEEKAVEYYFASDASAVIEHTNRVIFLEDDDVAAVVDGRLSIHRIKRTAGDHPGRAVQTLQMELQQIMKGNFSSFMQKEIFEQPESVVNTMRGRVNFDDYTVNLGGLKDHIKEIQRCRRLILIACGTSYHAGVATRQVLEELTELPVMVELASDFLDRNTPVFRDDVCFFLSQSGETADTLMGLRYCKERGALTVGITNTVGSSISRETDCGVHINAGPEIGVASTKAYTSQFVSLVMFALMMCDDRISMQERRKEIMLGLKRLPDLIKEVLSMDDEIQKLATELYHQKSVLIMGRGYHYATCLEGALKIKEITYMHSEGILAGELKHGPLALVDKLMPVIMIIMRDHTYAKCQNALQQVVARQGRPVVICDKEDTETIKNTKRTIKVPHSVDCLQGILSVIPLQLLAFHLAVLRGYDVDFPRNLAKSVTVE

SEQ ID NO: 421 - protein, 236 aa, Homo Sapiens
MSAPSATPIFAPGENCSPAWGAAPAAYDAADTHLRILGKPVMERWETPYMHALAAAASSKGGRVLEVGFGMAIAASKVQEAPIDEHWIIECNDGVFQRLRDWAPRQTHKVIPLKGLWEDVAPTLPDGHFDGILYDTYPLSEETWHTHQFNFIKNHAFRLLKPGGVLTYCNLTSWGELMKSKYSDITIMFEETQVPALLEAGFRRENIRTEVMALVPPADCRYYAFPQMITPLVTKG

SEQ ID NO: 422 - protein, 469 aa, Homo Sapiens
MAAASPLRDCQAWKDARLPLSTTSNEACKLFDATLTQYVKWTNDKSLGGIEGCLSKLKAADPTFVMGHAMATGLVLIGTGSSVKLDKELDLAVKTMVEISRTQPLTRREQLHVSAVETFANGNFPKACELWEQILQDHPTDMLALKFSHDAYFYLGYQEQMRDSVARIYPFWTPDIPLSSYVKGIYSFGLMETNFYDQAEKLAKEALSINPTDAWSVHTVAHIHEMKAEIKDGLEFMQHSETFWKDSDMLACHNYWHWALYLIEKGEYEAALTIYDTHILPSLQANDAMLDVVDSCSMLYRLQMEGVSVGQRWQDVLPVARKHSRDHILLFNDAHFLMASLGAHDPQTTQELLTTLRDASESPGENCQHLLARDVGLPLCQALVEAEDGNPDRVLELLLPIRYRIVQLGGSNAQRDVFNQLLIHAALNCTSSVHKNVARSLLMERDALKPNSPLTERLIRKAATVHLMQ

SEQ ID NO: 423 - protein, 185 aa, Homo Sapiens
MRRMRRMWATQGLAVALALSVLPGSRALRPGDCEVCISYLGRFYQDLKDRDVTFSPATIENELIKFCREARGKENRLCYYIGATDDAATKIINEVSKPLAHHIPVEKICEKLKKKDSQICELKYDKQIDLSTVDLKKLRVKELKKILDDWGETCKGCAEKSDYIRKINELMPKYAPKAASARTDL

SEQ ID NO: 424 - protein, 249 aa, Homo Sapiens
MFFSAALRARAAGLTAHWGRHVRNLHKTVMQNGAGGALFVHRDTPENNPDTPFDFTPENYKRIEAIVKNYPEGHKAAAVLPVLDLAQRQNGWLPISAMNKVAEVLQVPPMRVYEVATFYTMYNRKPVGKYHIQVCTTTPCMLRNSDSILEAIQKKLGIKVGETTPDKLFTLIEVECLGACVNAPMVQINDNYYEDLTAKDIEEIIDELKAGKIPKPGPRSGRFSCEPAGGLTSLTEPPKGPGFGVQAGL

SEQ ID NO: 425 - protein, 289 aa, Homo Sapiens
MVGVKPVGSDPDFQPELSGAGSRLAVVKFTMRGCGPCLRIAPAFSSMSNKYPQAVFLEVDVHQCQGTAATNNISATPTFLFFRNKVRIDQYQGADAVGLEEKIKQHLENDPGSNEDTDIPKGYMDLMPFINKAGCECLNESDEHGFDNCLRKDTTFLESDCDEQLLITVAFNQPVKLYSMKFQGPDNGQGPKYVKIFINLPRSMDFEEAERSEPTQALELTEDDIKEDGIVPLRYVKFQNVNSVTIFVQSNQGEEETTRISYFTFIGTPVQATNMNDFKRVVGKKGESH

SEQ ID NO: 426 - protein, 248 aa, Homo Sapiens
MSLFPSLPLLLLSMVAASYSETVTCEDAQKTCPAVIACSSPGINGFPGKDGRDGTKGEKGEPGQGLRGLQGPPGKLGPPGNPGPSGSPGPKGQKGDPGKSPDGDSSLAASERKALQTEMARIKKWLTFSLGKQVGNKFFLTNGEIMTFEKVKALCVKFQASVATPRNAAENGAIQNLIKEEAFLGITDEKTEGQFVDLTGNRLTYTNWNEGEPNNAGSDEDCVLLLKNGQWNDVPCSTSHLAVCEFPI

SEQ ID NO: 427 - protein, 418 aa, Homo Sapiens
MQALVLLLCIGALLGHSSCQNPASPPEEGSPDPDSTGALVEEEDPFFKVPVNKLAAAVSNFGYDLYRVRSSTSPTTNVLLSPLSVATALSALSLGAEQRTESIIHRALYYDLISSPDIHGTYKELLDTVTAPQKNLKSASRIVFEKKLRIKSSFVAPLEKSYGTRPRVLTGNPRLDLQEINNWVQAQMKGKLARSTKEIPDEISILLLGVAHFKGQWVTKFDSRKTSLEDFYLDEERTVRVPMMSDPKAVLRYGLDSDLSCKIAQLPLTGSMSIIFFLPLKVTQNLTLIEESLTSEFIHDIDRELKTVQAVLTVPKLKLSYEGEVTKSLQEMKLQSLFDSPDFSKITGKPIKLTQVEHRAGFEWNEDGAGTTPSPGLQPAHLTFPLDYHLNQPFIFVLRDTDTGALLFIGKILDPRGP

SEQ ID NO: 428 - protein, 482 aa, Homo Sapiens
MAALMTPGTGAPPAPGDFSGEGSQGLPDPSPEPKQLPELIRMKRDGGRLSEADIRGFVAAVVNGSAQGAQIGAMLMAIRLRGMDLEETSVLTQALAQSGQQLEWPEAWRQQLVDKHSTGGVGDKVSLVLAPALAACGCKVPMISGRGLGHTGGTLDKLESIPGFNVIQSPEQMQVLLDQAGCCIVGQSEQLVPADGILYAARDVTATVDSLPLITASILSKKLVEGLSALVVDVKFGGAAVFPNQEQARELAKTLVGVGASLGLRVAAALTAMDKPLGRCVGHALEVEEALLCMDGAGPPDLRDLVTTLGGALLWLSGHAGTQAQGAARVAAALDDGSALGRFERMLAAQGVDPGLARALCSGSPAERRQLLPRAREQEELLAPADGTVELVRALPLALVLHELGAGRSRAGEPLRLGVGAELLVDVGQRLRRGTPWLRVHRDGPALSGPQSRALQEALVLSDRAPFAAPSPFAELVLPPQQ

SEQ ID NO: 429 - protein, 302 aa, Homo Sapiens
MILLNNSHKLLALYKSLARSIPESLKVYGSVYHINHGNPFNMEVLVDSWPEYQMVIIRPQKQEMTDDMDSYTNVYRMFSKEPQKSEEVLKNCEIVNWKQRLQIQGLQESLGEGIRVATFSKSVKVEHSRALLLVTEDILKLNASSKSKLGSWAETGHPDDEFESETPNFKYAQLDVSYSGLVNDNWKRGKNERSLHYIKRCIEDLPAACMLGPEGVPVSWVTMDPSCEVGMAYSMEKYRRTGNMARVMVRYMKYLRQKNIPFYISVLEENEDSRRFVGQFGFFEASCEWHQWTCYPQNLVPF

SEQ ID NO: 430 - protein, 494 aa, Homo Sapiens
MPLYSVTVKWGKEKFEGVELNTDEPPMVFKAQLFALTGVQPARQKVMVKGGTLKDDDWGNIKIKNGMTLLMMGSADALPEEPSAKTVFVEDMTEEQLASAMELPCGLTNLGNTCYMNATVQCIRSVPELKDALKRYAGALRASGEMASAQYITAALRDLFDSMDKTSSSIPPIILLQFLHMAFPQFAEKGEQGQYLQQDANECWIQMMRVLQQKLEAIEDDSVKETDSSSASAATPSKKKSLIDQFFGVEFETTMKCTESEEEEVTKGKENQLQLSCFINQEVKYLFTGLKLRLQEEITKQSPTLQRNALYIKSSKISRLPAYLTIQMVRFFYKEKESVNAKVLKDVKFPLMLDMYELCTPELQEKMVSFRSKFKDLEDKKVNQQPNTSDKKSSPQKEVKYEPFSFADDIGSNNCGYYDLQAVLTHQGRSSSSGHYVSWVKRKQDEWIKFDDDKVSIVTPEDILRLSGGGDWHIAYVLLYGPRRVEIMEEESEQ

SEQ ID NO: 431 - protein, 586 aa, Homo Sapiens
MLARVTRKMLRHAKCFQRLAIFGSVRALHKDNRTATPQNFSNYESMKQDFKLGIPEYFNFAKDVLDQWTDKEKAGKKPSNPAFWWINRNGEEMRWSFEELGSLSRKFANILSEACSLQRGDRVILILPRVPEWWLANVACLRTGTVLIPGTTQLTQKDILYRLQSSKANCIITNDVLAPAVDAVASKCENLHSKLIVSENSREGWGNLKELMKHASDSHTCVKTKHNEIMAIFFTSGTSGYPKMTAHTHSSFGLGLSVNGRFWLDLTPSDVMWNTSDTGWAKSAWSSVFSPWIQGACVFTHHLPRFEPTSILQTLSKYPITVFCSAPTVYRMLVQNDITSYKFKSLKHCVSAGEPITPDVTEKWRNKTGLDIYEGYGQTETVLICGNFKGMKIKPGSMGKPSPAFDVKIVDVNGNVLPPGQEGDIGIQVLPNRPFGLFTHYVDNPSKTASTLRGNFYITGDRGYMDKDGYFWFVARADDVILSSGYRIGPFEVENALNEHPSVAESAVVSSPDPIRGEVVKAFVVLNPDYKSHDQEQLIKEIQEHVKKTTAPYKYPRKVEFIQELPKTISGKTKRNELRKKEWKTI

SEQ ID NO: 432 - protein, 2363 aa, Homo Sapiens
MTTTVATDYDNIEIQQQYSDVNNRWDVDDWDNENSSARLFERSRIKALADEREAVQKKTFTKWVNSHLARVSCRITDLYTDLRDGRMLIKLLEVLSGERLPKPTKGRMRIHCLENVDKALQFLKEQRVHLENMGSHDIVDGNHRLTLGLIWTIILRFQIQDISVETEDNKEKKSAKDALLLWCQMKTAGYPNVNIHNFTTSWRDGMAFNALIHKHRPDLIDFDKLKKSNAHYNLQNAFNLAEQHLGLTKLLDPEDISVDHPDEKSIITYVVTYYHYFSKMKALAVEGKRIGKVLDNAIETEKMIEKYESLASDLLEWIEQTIIILNNRKFANSLVGVQQQLQAFNTYRTVEKPPKFTEKGNLEVLLFTIQSKMRANNQKVYMPREGKLISDINKAWERLEKAEHERELALRNELIRQEKLEQLARRFDRKAAMRETWLSENQRLVSQDNFGFDLPAVEAATKKHEAIETDIAAYEERVQAVVAVARELEAENYHDIKRITARKDNVIRLWEYLLELLRARRQRLEMNLGLQKIFQEMLYIMDWMDEMKVLVLSQDYGKHLLGVEDLLQKHTLVEADIGIQAERVRGVNASAQKFATDGEGYKPCDPQVIRDRVAHMEFCYQELCQLAAERRARLEESRRLWKFFWEMAEEEGWIREKEKILSSDDYGKDLTSVMRLLSKHRAFEDEMSGRSGHFEQAIKEGEDMIAEEHFGSEKIRERIIYIREQWANLEQLSAIRKKRLEEASLLHQFQADADDIDAWMLDILKIVSSSDVGHDEYSTQSLVKKHKDVAEEIANYRPTLDTLHEQASALPQEHAESPDVRGRLSGIEERYKEVAELTRLRKQALQDTLALYKMFSEADACELWIDEKEQWLNNMQIPEKLEDLEVIQHRFESLEPEMNNQASRVAVVNQIARQLMHSGHPSEKEIKAQQDKLNTRWSQFRELVDRKKDALLSALSIQNYHLECNETKSWIREKTKVIESTQDLGNDLAGVMALQRKLTGMERDLVAIEAKLSDLQKEAEKLESEHPDQAQAILSRLAEISDVWEEMKTTLKNREASLGEASKLQQFLRDLDDFQSWLSRTQTAIASEDMPNTLTEAEKLLTQHENIKNEIDNYEEDYQKMRDMGEMVTQGQTDAQYMFLRQRLQALDTGWNELHKMWENRQNLLSQSHAYQQFLRDTKQAEAFLNNQEYVLAHTEMPTTLEGAEAAIKKQEDFMTTMDANEEKINAVVETGRRLVSDGNINSDRIQEKVDSIDDRHRKNRETASELLMRLKDNRDLQKFLQDCQELSLWINEKMLTAQDMSYDEARNLHSKWLKHQAFMAELASNKEWLDKIEKEGMQLISEKPETEAVVKEKLTGLHKMWEVLESTTQTKAQRLFDANKAELFTQSCADLDKWLHGLESQIQSDDYGKDLTSVNILLKKQQMLENQMEVRKKEIEELQSQAQALSQEGKSTDEVDSKRLTVQTKFMELLEPLNERKHNLLASKEIHQFNRDVEDEILWVGERMPLATSTDHGHNLQTVQLLIKKNQTLQKEIQGHQPRIDDIFERSQNIVTDSSSLSAEAIRQRLADLKQLWGLLIEETEKRHRRLEEAHRAQQYYFDAAEAEAWMSEQELYMMSEEKAKDEQSAVSMLKKHQILEQAVEDYAETVHQLSKTSRALVADSHPESERISMRQSKVDKLYAGLKDLAEERRGKLDERHRLFQLNREVDDLEQWIAEREVVAGSHELGQDYEHVTMLQERFREFARDTGNIGQERVDTVNHLADELINSGHSDAATIAEWKDGLNEAWADLLELIDTRTQILAASYELHKFYHDAKEIFGRIQDKHKKLPEELGRDQNTVETLQRMHTTFEHDIQALGTQVRQLQEDAARLQAAYAGDKADDIQKRENEVLEAWKSLLDACESRRVRLVDTGDKFRFFSMVRDLMLWMEDVIRQIEAQEKPRDVSSVELLMNNHQGIKAEIDARNDSFTTCIELGKSLLARKHYASEEIKEKLLQLTEKRKEMIDKWEDRWEWLRLILEVHQFSRDASVAEAWLLGQEPYLSSREIGQSVDEVEKLIKRHEAFEKSAATWDERFSALERLTTLELLEVRRQQEEEERKRRPPSPEPSTKVSEEAESQQQWDTSKGEQVSQNGLPAEQGSPRMAETVDTSEMVNGATEQRTSSKESSPIPSPTSDRKAKTALPAQSAATLPARTQETPSAQMEGFLNRKHEWEAHNKKASSRSWHNVYCVINNQEMGFYKDAKTAASGIPYHSEVPVSLKEAVCEVALDYKKKKHVFKLRLNDGNEYLFQAKDDEEMNTWIQAISSAISSDKHEVSASTQSTPASSRAQTLPTSVVTITSESPGKREKDKEKDKEKRFSLFGKKK

SEQ ID NO: 433 - protein, 972 aa, Homo Sapiens
MDTDLYDEFGNYIGPELDSDEDDDELGRETKDLDEMDDDDDDDDVGDHDDDHPGMEVVLHEDKKYYPTAEEVYGPEVETIVQEEDTQPLTEPIIKPVKTKKFTLMEQTLPVTVYEMDFLADLMDNSELIRNVTLCGHLHHGKTCFVDCLIEQTHPEIRKRYDQDLCYTDILFTEQERGVGIKSTPVTVVLPDTKGKSYLFNIMDTPGHVNFSDEVTAGLRISDGVVLFIDAAEGVMLNTERLIKHAVQERLAVTVCINKIDRLILELKLPPTDAYYKLRHIVDEVNGLISMYSTDENLILSPLLGNVCFSSSQYSICFTLGSFAKIYADTFGDINYQEFAKRLWGDIYFNPKTRKFTKKAPTSSSQRSFVEFILEPLYKILAQVVGDVDTSLPRTLDELGIHLTKEELKLNIRPLLRLVCKKFFGEFTGFVDMCVQHIPSPKVGAKPKIEHTYTGGVDSDLGEAMSDCDPDGPLMCHTTKMYSTDDGVQFHAFGRVLSGTIHAGQPVKVLGENYTLEDEEDSQICTVGRLWISVARYHIEVNRVPAGNWVLIEGVDQPIVKTATITEPRGNEEAQIFRPLKFNTTSVIKIAVEPVNPSELPKMLDGLRKVNKSYPSLTTKVEESGEHVILGTGELYLDCVMHDLRKMYSEIDIKVADPVVTFCETVVETSSLKCFAETPNKKNKITMIAEPLEKGLAEDIENEVVQITWNRKKLGEFFQTKYDWDLLAARSIWAFGPDATGPNILVDDTLPSEVDKALLGSVKDSIVQGFQWGTREGPLCDELIRNVKFKILDAVVAQEPLHRGGGQIIPTARRVVYSAFLMATPRLMEPYYFVEVQAPADCVSAVYTVLARRRGHVTQDAPIPGSPLYTIKAFIPAIDSFGFETDLRTHTQGQAFSLSVFHHWQIVPGDPLDKSIVIRPLEPQPAPHLAREFMIKTRRRKGLSEDVSISKFFDDPMLLELAKQDVVLNYPM

SEQ ID NO: 434 - protein, 981 aa, Homo Sapiens
MDGFAGSLDDSISAASTSDVQDRLSALESRVQQQEDEITVLKAALADVLRRLAISEDHVASVKKSVSSKGQPSPRAVIPMSCITNGSGANRKPSHTSAVSIAGKETLSSAAKSGTEKKKEKPQGQREKKEESHSNDQSPQIRASPSPQPSSQPLQIHRQTPESKNATPTKSIKRPSPAEKSHNSWENSDDSRNKLSKIPSTPKLIPKVTKTADKHKDVIINQEGEYIKMFMRGRPITMFIPSDVDNYDDIRTELPPEKLKLEWAYGYRGKDCRANVYLLPTGKIVYFIASVVVLFNYEERTQRHYLGHTDCVKCLAIHPDKIRIATGQIAGVDKDGRPLQPHVRVWDSVTLSTLQIIGLGTFERGVGCLDFSKADSGVHLCIIDDSNEHMLTVWDWQKKAKGAEIKTTNEVVLAVEFHPTDANTIITCGKSHIFFWTWSGNSLTRKQGIFGKYEKPKFVQCLAFLGNGDVLTGDSGGVMLIWSKTTVEPTPGKGPKGVYQISKQIKAHDGSVFTLCQMRNGMLLTGGGKDRKIILWDHDLNPEREIEVPDQYGTIRAVAEGKADQFLVGTSRNFILRGTFNDGFQIEVQGHTDELWGLATHPFKDLLLTCAQDRQVCLWNSMEHRLEWTRLVDEPGHCADFHPSGTVVAIGTHSGRWFVLDAETRDLVSIHTDGNEQLSVMRYSIDGTFLAVGSHDNFIYLYVVSENGRKYSRYGRCTGHSSYITHLDWSPDNKYIMSNSGDYEILYWDIPNGCKLIRNRSDCKDIDWTTYTCVLGFQVFGVWPEGSDGTDINALVRSHNRKVIAVADDFCKVHLFQYPCSKAKAPSHKYSAHSSHVTNVSFTHNDSHLISTGGKDMSIIQWKLVEKLSLPQNETVADTTLTKAPVSSTESVIQSNTPTPPPSQPLNETAEEESRISSSPTLLENSLEQTVEPSEDHSEEESEEGSGDLGEPLYEEPCNEISKEQAKATLLEDQQDPSPSS

SEQ ID NO: 435 - protein, 325 aa, Homo Sapiens
MSLQSRLSGRLAQLRAAGQLLVPPRPRPGHLAGATRTRSSTCGPPAFLGVFGRRARTSAGVGAWGAAAVGRTAGVRTWAPLAMAAKVDLSTSTDWKEAKSFLKGLSDKQREEHYFCKDFVRLKKIPTWKEMAKGVAVKVEEPRYKKDKQLNEKISLLRSDITKLEVDAIVNAANSSLLGGGGVDGCIHRAAGPLLTDECRTLQSCKTGKAKITGGYRLPAKYVIHTVGPIAYGEPSASQAAELRSCYLSSLDLLLEHRLRSVAFPCISTGVFGYPCEAAAEIVLATLREWLEQHKDKVDRLIICVFLEKDEDIYRSRLPHYFPVA

SEQ ID NO: 436 - protein, 423 aa, Homo Sapiens
MAAAAVVEFQRAQSLLSTDREASIDILHSIVKRDIQENDEEAVQVKEQSILELGSLLAKTGQAAELGGLLKYVRPFLNSISKAKAARLVRSLLDLFLDMEAATGQEVELCLECIEWAKSEKRTFLRQALEARLVSLYFDTKRYQEALHLGSQLLRELKKMDDKALLVEVQLLESKTYHALSNLPKARAALTSARTTANAIYCPPKLQATLDMQSGIIHAAEEKDWKTAYSYFYEAFEGYDSIDSPKAITSLKYMLLCKIMLNTPEDVQALVSGKLALRYAGRQTEALKCVAQASKNRSLADFEKALTDYRAELRDDPIISTHLAKLYDNLLEQNLIRVIEPFSRVQIEHISSLIKLSKADVERKLSQMILDKKFHAGILDQGEGVLIIFDEPPVDKTYEAALETIQNMSKVVDSLYNKAKKLT

SEQ ID NO: 437 - protein, 227 aa, Homo Sapiens
MPEINTNHLDKQQVQLLAEMCILIDENDNKIGAETKKNCHLNENIEKGLLHRAFSVFLFNTENKLLLQQRSDAKITFPGCFTNTCCSHPLSNPAELEESDALGVRRAAQRRLKAELGIPLEEVPPEEINYLTRIHYKAQSDGIWGEHEIDYILLVRKNVTLNPDPNEIKSYCYVSKEELKELLKKAASGEIKITPWFKIIAATFLFKWWDNLNHLNQFVDHEKIYRM

SEQ ID NO: 438 - protein, 2390 aa, Homo Sapiens
MSSTLSPTDFDSLEIQGQYSDINNRWDLPDSDWDNDSSSARLFERSRIKALADEREAVQKKTFTKWVNSHLARVTCRVGDLYSDLRDGRNLLRLLEVLSGEILPKPTKGRMRIHCLENVDKALQFLKEQKVHLENMGSHDIVDGNHRLTLGLVWTIILRFQIQDISVETEDNKEKKSAKDALLLWCQMKTAGYPNVNVHNFTTSWRDGLAFNAIVHKHRPDLLDFESLKKCNAHYNLQNAFNLAEKELGLTKLLDPEDVNVDQPDEKSIITYVATYYHYFSKMKALAVEGKRIGKVLDHAMEAERLVEKYESLASELLQWIEQTIVTLNDRQLANSLSGVQNQLQSFNSYRTVEKPPKFTEKGNLEVLLFTIQSKLRANNQKVYTPREGRLISDINKAWERLEKAEHERELALRTELIRQEKLEQLAARFDRKAAMRETWLSENQRLVSQDNFGLELAAVEAAVRKHEAIETDIVAYSGRVQAVDAVAAELAAERYHDIKRIAARQHNVARLWDFLRQMVAARRERLLLNLELQKVFQDLLYLMDWMEEMKGRLQSQDLGRHLAGVEDLLQLHELVEADIAVQAERVRAVSASALRFCNPGKEYRPCDPQLVSERVAKLEQSYEALCELAAARRARLEESRRLWRFLWEVGEAEAWVREQQHLLASADTGRDLTGALRLLNKHTALRGEMSGRLGPLKLTLEQGQQLVAEGHPGASQASARAAELQAQWERLEALAEERAQRLAQAASLYQFQADANDMEAWLVDALRLVSSPELGHDEFSTQALARQHRALEEEIRSHRPTLDALREQAAALPPTLSRTPEVQSRVPTLERHYEELQARAGERARALEAALALYTMLSEAGACGLWVEEKEQWLNGLALPERLEDLEVVQQRFETLEPEMNTLAAQITAVNDIAEQLLKANPPGKDRIVNTQEQLNHRWQQFRRLADGKKAALTSALSIQNYHLECTETQAWMREKTKVIESTQGLGNDLAGVLALQRKLAGTERDLEAIAARVGELTREANALAAGHPAQAVAINARLREVQTGWEDLRATMRRREESLGEARRLQDFLRSLDDFQAWLGRTQTAVASEEGPATLPEAEALLAQHAALRGEVERAQSEYSRLRALGEEVTRDQADPQCLFLRQRLEALGTGWEELGRMWESRQGRLAQAHGFQGFLRDARQAEGVLSSQEYVLSHTEMPGTLQAADAAIKKLEDFMSTMDANGERIHGLLEAGRQLVSEGNIHADKIREKADSIERRHKKNQDAAQQFLGRLRDNREQQHFLQDCHELKLWIDEKMLTAQDVSYDEARNLHTKWQKHQAFMAELAANKDWLDKVDKEGRELTLEKPELKALVSEKLRDLHRRWDELETTTQAKARSLFDANRAELFAQSCCALESWLESLQAQLHSDDYGKDLTSVNILLKKQQMLEWEMAVREKEVEAIQAQAKALAQEDQGAGEVERTSRAVEEKFRALCQPMRERCRRLQASREQHQFHRDVEDEILWVTERLPMASSMEHGKDLPSVQLLMKKNQTLQKEIQGHEPRIADLRERQRALGAAAAGPELAELQEMWKRLGHELELRGKRLEDALRAQQFYRDAAEAEAWMGEQELHMMGQEKAKDELSAQAEVKKHQVLEQALADYAQTIHQLAASSQDMIDHEHPESTRISIRQAQVDKLYAGLKELAGERRERLQEHLRLCQLRRELDDLEQWIQEREVVAASHELGQDYEHVTMLRDKFREFSRDTSTIGQERVDSANALANGLIAGGHAARATVAEWKDSLNEAWADLLELLDTRGQVLAAAYELQRFLHGARQALARVQHKQQQLPDGTGRDLNAAEALQRRHCAYEHDIQALSPQVQQVQDDGHRLQKAYAGDKAEEIGRHMQAVAEAWAQLQGSSAARRQLLLDTTDKFRFFKAVRELMLWMDEVNLQMDAQERPRDVSSADLVIKNQQGIKAEIEARADRFSSCIDMGKELLARSHYAAEEISEKLSQLQARRQETAEKWQEKMDWLQLVLEVLVFGRDAGMAEAWLCSQEPLVRSAELGCTVDEVESLIKRHEAFQKSAVAWEERFCALEKLTALEEREKERKRKREEEERRKQPPAPEPTASVPPGDLVGGQTASDTTWDGTQPRPPPSTQAPSVNGVCTDGEPSQPLLGQQRLEHSSFPEGPGPGSGDEANGPRGERQTRTRGPAPSAMPQSRSTESAHAATLPPRGPEPSAQEQMEGMLCRKQEMEAFGKKAANRSWQNVYCVLRRGSLGFYKDAKAASAGVPYHGEVPVSLARAQGSVAFDYRKRKHVFKLGLQDGKEYLFQAKDEAEMSSWLRVVNAAIATASSASGEPEEPVVPSTTRGMTRAMTMPPVSPVGAEGPVVLRSKDGREREREKRFSFFKKNK

SEQ ID NO: 439 - protein, 185 aa, Homo Sapiens
MAPKGSSKQQSEEDLLLQDFSRNLSAKSSALFFGNAFIVSAIPIWLYWRIWHMDLIQSAVLYSVMTLVSTYLVAFAYKNVKFVLKHKVAQKREDAVSKEVTRKLSEADNRKMSRKEKDERILWKKNEVADYEATTFSIFYNNTLFLVVVIVASFFILKNFNPTVNYILSISASSGLIALLSTGSK

SEQ ID NO: 440 - protein, 962 aa, Homo Sapiens
MDDSEVESTASILASVKEQEAQFEKLTRALEEERRHVSAQLERVRVSPQDANPLMANGTLTRRHQNGRFVGDADLERQKFSDLKLNGPQDHSHLLYSTIPRMQEPGQIVETYTEEDPEGAMSVVSVETSDDGTTRRTETTVKKVVKTVTTRTVQPVAMGPDGLPVDASSVSNNYIQTLGRDFRKNGNGGPGPYVGQAGTATLPRNFHYPPDGYSRHYEDGYPGGSDNYGSLSRVTRIEERYRPSMEGYRAPSRQDVYGPQPQVRVGGSSVDLHRFHPEPYGLEDDQRSMGYDDLDYGMMSDYGTARRTGTPSDPRRRLRSYEDMIGEEVPSDQYYWAPLAQHERGSLASLDSLRKGGPPPPNWRQPELPEVIAMLGFRLDAVKSNAAAYLQHLCYRNDKVKTDVRKLKGIPVLVGLLDHPKKEVHLGACGALKNISFGRDQDNKIAIKNCDGVPALVRLLRKARDMDLTEVITGTLWNLSSHDSIKMEIVDHALHALTDEVIIPHSGWEREPNEDCKPRHIEWESVLTNTAGCLRNVSSERSEARRKLRECDGLVDALIFIVQAEIGQKDSDSKLVENCVCLLRNLSYQVHREIPQAERYQEAAPNVANNTGPHAASCFGAKKGKGKKPIEDPANDTVDFPKRTSPARGYELLFQPEVVRIYISLLKESKTPAILEASAGAIQNLCAGRWTYGRYIRSALRQEKALSAIADLLTNEHERVVKAASGALRNLAVDARNKELIGKHAIPNLVKNLPGGQQNSSWNFSEDTVISILNTINEVIAENLEAAKKLRETQGIEKLVLINKSGNRSEKEVRAAALVLQTIWGYKELRKPLEKEGWKKSDFQVNLNNASRSQSSHSYDDSTLPLIDRNQKSDKKPDREEIQMSNMGSNTKSLDNNYSTPNERGDHNRTLDRSGDLGDMEPLKGTTPLMQDEGQESLEEELDVLVLDDEGGQVSYPSMQKI

SEQ ID NO: 441 - protein, 490 aa, Homo Sapiens
MAAEQDPEARAAARPLLTDLYQATMALGYWRAGRARDAAEFELFFRRCPFGGAFALAAGLRDCVRFLRAFRLRDADVQFLASVLPPDTDPAFFEHLRALDCSEVTVRALPEGSLAFPGVPLLQVSGPLLVVQLLETPLLCLVSYASLVATNAARLRLIAGPEKRLLEMGLRRAQGPDGGLTASTYSYLGGFDSSSNVLAGQLRGVPVAGTLAHSFVTSFSGSEVPPDPMLAPAAGEGPGVDLAAKAQVWLEQVCAHLGLGVQEPHPGERAAFVAYALAFPRAFQGLLDTYSVWRSGLPNFLAVALALGELGYRAVGVRLDSGDLLQQAQEIRKVFRAAAAQFQVPWLESVLIVVSNNIDEEALARLAQEGSEVNVIGIGTSVVTCPQQPSLGGVYKLVAVGGQPRMKLTEDPEKQTLPGSKAAFRLLGSDGSPLMDMLQLAEEPVPQAGQELRVWPPGAQEPCTVRPAQVEPLLRLCLQQGQVAAPPPSS

SEQ ID NO: 442 - protein, 523 aa, Homo Sapiens [sequence omitted]

SEQ ID NO: 443 - protein, 660 aa, Homo Sapiens
MDVLVSECSARLLQQEEEIKSLTAEIDRLKNCGCLGASPNLEQLQEENLKLKYRLNILRKSLQAERNKPTKNMINIISRLQEVFGHAIKAAYPDLENPPLLVTPSQQAKFGDYQCNSAMGISQMLKTKEQKVNPREIAENITKHLPDNECIEKVEIAGPGFINVHLRKDFVSEQLTSLLVNGVQLPALGENKKVIVDFSSPNIAKEMHVGHLRSTIIGESISRLFEFAGYDVLRLNHVGDWGTQFGMLIAHLQDKFPDYLTVSPPIGDLQVFYKESKKRFDTEEEFKKRAYQCVVLLQGKNPDITKAWKLICDVSRQELNKIYDALDVSLIERGESFYQDRMNDIVKEFEDRGFVQVDDGRKIVFVPGCSIPLTIVKSDGGYTYDTSDLAAIKQRLFEEKADMIIYVVDNGQSVHFQTIFAAAQMIGWYDPKVTRVFHAGFGVVLGEDKKKFKTRSGETVRLMDLLGEGLKRSMDKLKEKERDKVLTAEELNAAQTSVAYGCIKYADLSHNRLNDYIFSFDKMLDDRGNTAAYLLYAFTRIRSIARLANIDEEMLQKAARETKILLDHEKEWKLGRCILRFPEILQKILDDLFLHTLCDYIYELATAFTEFYDSCYCVEKDRQTGKILKVNMWRMLLCEAVAAVMAKGFDILGIKPVQRM

SEQ ID NO: 444 - protein, 1382 aa, Homo Sapiens
MPAYFQRPENALKRANEFLEVGKKQPALDVLYDVMKSKKHRTWQKIHEPIMLKYLELCVDLRKSHLAKEGLYQYKNICQQVNIKSLEDVVRAYLKMAEEKTEAAKEESQQMVLDIEDLDNIQTPESVLLSAVSGEDTQDRTDRLLLTPWVKFLWESYRQCLDLLRNNSRVERLYHDIAQQAFKFCLQYTRKAEFRKLCDNLRMHLSQIQRHHNQSTAINLNNPESQSMHLETRLVQLDSAISMELWQEAFKAVEDIHGLFSLSKKPPKPQLMANYYNKVSTVFWKSGNALFHASTLHRLYHLSREMRKNLTQDEMQRMSTRVLLATLSIPITPERTDIARLLDMDGIIVEKQRRLATLLGLQAPPTRIGLINDMVRFNVLQYVVPEVKDLYNWLEVEFNPLKLCERVTKVLNWVREQPEKEPELQQYVPQLQNNTILRLLQQVSQIYQSIEFSRLTSLVPFVDAFQLERAIVDAARHCDLQVRIDHTSRTLSFGSDLNYATREDAPIGPHLQSMPSEQIRNQLTAMSSVLAKALEVIKPAHILQEKEEQHQLAVTAYLKNSRKEHQRILARRQTIEERKERLESLNIQREKEELEQREAELQKVRKAEEERLRQEAKEREKERILQEHEQIKKKTVRERLEQIKKTELGAKAFKDIDIEDLEELDPDFIMAKQVEQLEKEKKELQERLKNQEKKIDYFERAKRLEEIPLIKSAYEEQRIKDMDLWEQQEEERITTMQLEREKALEHKNRMSRMLEDRDLFVMRLKAARQSVYEEKLKQFEERLAEERHNRLEERKRQRKEERRITYYREKEEEEQRRAEEQMLKEREERERAERAKREEELREYQERVKKLEEVERKKRQRELEIEERERRREEERRLGDSSLSRKDSRWGDRDSEGTWRKGPEADSEWRRGPPEKEWRRGEGRDEDRSHRRDEERPRRLGDDEDREPSLRPDDDRVPRRGMDDDRGPRRGPEEDRFSRRGADDDRPSWRNTDDDRPPRRIADEDRGNWRHADDDRPPRRGLDEDRGSWRTADEDRGPRRGMDDDRGPRRGGADDERSSWRNADDDRGPRRGLDDDRGPRRGMDDDRGPRRGMDDDRGPRRGMDDDRGPRRGLDDDRGPWRNADDDRIPRRGAEDDRGPWRNMDDDRLSRRADDDRFPRRGDDSRPGPWRPLVKPGGWREKEKAREESWGPPRESRPSEEREWDREKERDRDNQDREENDKDPERERDRERDVDREDRFRRPRDEGGWRRGPAEESSSWRDSSRRDDRDRDDRRRERDDRRDLRERRDLRDDRDRRGPPLRSEREEVSSWRRADDRKDDRVEERDPPRRVPPPALSRDRERDRDREREGEKEKASWRAEKDRESLRRTKNETDEDGWTTVRR

SEQ ID NO: 445 - protein, 348 aa, Homo Sapiens
MYTAIPQSGSPFPGSVQDPGLHVWRVEKLKPVPVAQENQGVFFSGDSYLVLHNGPEEVSHLHLWIGQQSSRDEQGACAVLAVHLNTLLGERPVQHREVQGNESDLFMSYFPRGLKYQEGGVESAFHKTSTGAPAAIKKLYQVKGKKNIRATERALNWDSFNTGDCFILDLGQNIFAWCGGKSNILERNKARDLALAIRDSERQGKAQVEIVTDGEEPAEMIQVLGPKPALKEGNPEEDLTADKANAQAAALYKVSDATGQMNLTKVADSSPFALELLISDDCFVLDNGLCGKIYIWKGRKANEKERQAALQVAEGFISRMQYAPNTQVEILPQGHESPIFKQFFKDWK

SEQ ID NO: 446 - protein, 147 aa, Homo Sapiens
MASHRLLLLCLAGLVFVSEAGPTGTGESKCPLMVKVLDAVRGSPAINVAVHVFRKAADDTWEPFASGKTSESGELHGLTTEEEFVEGIYKVEIDTKSYWKALGISPFHEHAEVVFTANDSGPRRYTIAALLSPYSYSTTAVVTNPKE

SEQ ID NO: 447 - protein, 1136 aa, Homo Sapiens
MAKMEVKTSLLDNMIGVGDMVLLEPLNEETFINNLKKRFDHSEIYTYIGSVVISVNPYRSLPIYSPEKVEEYRNRNFYELSPHIFALSDEAYRSLRDQDKDQCILITGESGAGKTEASKLVMSYVAAVCGKGAEVNQVKEQLLQSNPVLEAFGNAKTVRNDNSSRFGKYMDIEFDFKGDPLGGVISNYLLEKSRVVKQPRGERNFHVFYQLLSGASEELLNKLKLERDFSRYNYLSLDSAKVNGVDDAANFRTVRNAMQIVGFMDHEAESVLAVVAAVLKLGNIEFKPESRVNGLDESKIKDKNELKEICELTGIDQSVLERAFSFRTVEAKQEKVSTTLNVAQAYYARDALAKNLYSRLFSWLVNRINESIKAQTKVRKKVMGVLDIYGFEIFEDNSFEQFIINYCNEKLQQIFIELTLKEEQEEYIREDIEWTHIDYFNNAIICDLIENNTNGILAMLDEECLRPGTVTDETFLEKLNQVCATHQHFESRMSKCSRFLNDTSLPHSCFRIQHYAGKVLYQVEGFVDKNNDLLYRDLSQAMWKASHALIKSLFPEGNPAKINLKRPPTAGSQFKASVATLMKNLQTKNPNYIRCIKPNDKKAAHIFNEALVCHQIRYLGLLENVRVRRAGYAFRQAYEPCLERYKMLCKQTWPHWKGPARSGVEVLFNELEIPVEEYSFGRSKIFIRNPRTLFKLEDLRKQRLEDLATLIQKIYRGWKCRTHFLLMKKSQIVIAAWYRRYAQQKRYQQTKSSALVIQSYIRGWKARKILRELKHQKRCKEAVTTIAAYWHGTQARRELRRLKEEARNKHAIAVIWAYWLGSKARRELKRLKEEARRKHAVAVIWAYWLGLKVRREYRKFFRANAGKKIYEFTLQRIVQKYFLEMKNKMPSLSPIDKNWPSRPYLFLDSTHKELKRIFHLWRCKKYRDQFTDQQKLIYEEKLEASELFKDKKALYPSSVGQPFQGAYLEINKNPKYKKLKDAIEEKIIIAEVVNKINRANGKSTSRIFLLTNNNLLLADQKSGQIKSEVPLVDVTKVSMSSQNDGFFAVHLKEGSEAASKGDFLFSSDHLIEMATKLYRTTLSQTKQKLNIEISDEFLVQFRQDKVCVKFIQGNQKNGSVPTCKRKNNRLLEVAVP

SEQ ID NO: 448 - protein, 459 aa, Homo Sapiens
MTAEEMKATESGAQSAPLPMEGVDISPKQDEGVLKVIKREGTGTEMPMIGDRVFVHYTGWLLDGTKFDSSLDRKDKFSFDLGKGEVIKAWDIAIATMKVGEVCHITCKPEYAYGSAGSPPKIPPNATLVFEVELFEFKGEDLTEEEDGGIIRRIQTRGEGYAKPNEGAIVEVALEGYYKDKLFDQRELRFEIGEGENLDLPYGLERAIQRMEKGEHSIVYLKPSYAFGSVGKEKFQIPPNAELKYELHLKSFEKAKESWEMNSEEKLEQSTIVKERGTVYFKEGKYKQALLQYKKIVSWLEYESSFSNEEAQKAQALRLASHLNLAMCHLKLQAFSAAIESCNKALELDSNNEKGLFRRGEAHLAVNDFELARADFQKVLQLYPNNKAAKTQLAVCQQRIRRQLAREKKLYANMFERLAEEENKAKAEASSGDHPTDTEMKEEQKSNTAGSQSQVETEA

SEQ ID NO: 449 - protein, 740 aa, Homo Sapiens
MAAFSEMGVMPEIAQAVEEMDWLLPTDIQAESIPLILGGGDVLMAAETGSGKTGAFSIPVIQIVYETLKDQQEGKKGKTTIKTGASVLNKWQMNPYDRGSAFAIGSDGLCCQSREVKEWHGCRATKGLMKGKHYYEVSCHDQGLCRVGWSTMQASLDLGTDKFGFGFGGTGKKSHNKQFDNYGEEFTMHDTIGCYLDIDKGHVKFSKNGKDLGLAFEIPPHMKNQALFPACVLKNAELKFNFGEEEFKFPPKDGFVALSKAPDGYIVKSQHSGNAQVTQTKFLPNAPKALIVEPSRELAEQTLNNIKQFKKYIDNPKLRELLIIGGVAARDQLSVLENGVDIVVGTPGRLDDLVSTGKLNLSQVRFLVLDEADGLLSQGYSDFINRMHNQIPQVTSDGKRLQVIVCSATLHSFDVKKLSEKIMHFPTWVDLKGEDSVPDTVHHVVVPVNPKTDRLWERLGKSHIRTDDVHAKDNTRPGANSPEMWSEAIKILKGEYAVRAIKEHKMDQAIIFCRTKIDCDNLEQYFIQQGGGPDKKGHQFSCVCLHGDRKPHERKQNLERFKKGDVRFLICTDVAARGIDIHGVPYVINVTLPDEKQNYVHRIGRVGRAERMGLAISLVATEKEKVWYHVCSSRGKGCYNTRLKEDGGCTIWYNEMQLLSEIEEHLNCTISQVEPDIKVPVDEFDGKVTYGQKRAAGGGSYKGHVDILAPTVQELAALEKEAQTSFLHLGYLPNQLFRTF

SEQ ID NO: 450 - protein, 308 aa, Homo Sapiens
MVVGRGLLGRRSLAALGAACARRGLGPALLGVFCHTDLRKNLTVDEGTMKVEVLPALTDNYMYLVIDDETKEAAIVDPVQPQKVVDAARKHGVKLTTVLTTHHHWDHAGGNEKLVKLESGLKVYGGDDRIGALTHKITHLSTLQVGSLNVKCLATPCHTSGHICYFVSKPGGSEPPAVFTGDTLFVAGCGKFYEGTADEMCKALLEVLGRLPPDTRVYCGHEYTINNLKFARHVEPGNAAIREKLAWAKEKYSIGEPTVPSTLAEEFTYNPFMRVREKTVQQHAGETDPVTTMRAVRREKDQFKMPRD

SEQ ID NO: 451 - protein, 419 aa, Homo Sapiens
MAVSNIRYGAAVTKEVGMDLKNMGAKNVCLMTDKNLSKLPPVQVAMDSLVKNGIPFTVYDNVRVEPTDSSFMEAIEFAQKGAFDAYVAVGGGSTMDTCKAANLYASSPHSDFLDYVSAPIGKGKPVSVPLKPLIAVPTTSGTGSETTGVAIFDYEHLKVKIGITSRAIKPTLGLIDPLHTLHMPARVVANSGFDVLCHALESYTTLPYHLRSPCPSNPITRPAYQGSNPISDIWAIHALRIVAKYLKRAVRNPDDLEARSHMHLASAFAGIGFGNAGVHLCHGMSYPISGLVKMYKAKDYNVDHPLVPHGLSVVLTSPAVFTFTAQMFPERHLEMAEILGADTRTARIQDAGLVLADTLRKFLFDLDVDDGLAAVGYSKADIPALVKGTLPQERVTKLAPCPQSEEDLAALFEASMKLY

SEQ ID NO: 452 - protein, 257 aa, Homo Sapiens
MAPPAPGPASGGSGEVDELFDVKNAFYIGSYQQCINEAQRVKLSSPERDVERDVFLYRAYLAQRKFGVVLDEIKPSSAPELQAVRMFADYLAHESRSTAMTVQILLKLDRLDLARKELKRMQDLDEDATLTQLATAWVSLATGGEKLQDAYYIFQEMADKCSPTLLLLNGQAACHMAQGRWEAAEGLLQEALDKDSGYPETLVNLIVLSQHLGKPPEVTNRYLSQLKDAHRSHPFIKEYQAKENDFDRLVLQYAPSA

SEQ ID NO: 453 - protein, 453 aa, Homo Sapiens
MPGSSGAGMEAAVAPGRDAPAPAASQPSGCGKHNSPERKVYMDYNATTPLEPEVIQAMTKAMWEAWGNPSSPYSAGRKAKDIINAARESLAKMIGGKPQDIIFTSGGTESNNLVIHSVVKHFHANQTSKGHTGGHHSPVKGAKPHFITSSVEHDSIRLPLEHLVEEQVAAVTFVPVSKVSGQAEVDDILAAVRPTTRLVTIMLANNETGIVMPVPEISQRIKALNQERVAAGLPPILVHTDAAQALGKQRVDVEDLGVDFLTIVGHKFYGPRIGALYIRGLGEFTPLYPMLFGGGQERNFRPGTENTPMIAGLGKAAELVTQNCEAYEAHMRDVRDYLEERLEAEFGQKRIHLNSQFPGTQRLPNTCNFSIRGPRLQGHVVLAQCRVLMASVGAACHSDHGDQPSPVLLSYGVPFDVARNALRLSVGRSTTRAEVDLVVQDLKQAVAQLEDQA

SEQ ID NO: 454 - protein, 775 aa, Homo Sapiens
MAALDSLSLFTSLGLSEQKARETLKNSALSAQLREAATQAQQTLGSTIDKATGILLYGLASRLRDTRRLSFLVSYIASKKIHTEPQLSAALEYVRSHPLDPIDTVDFERECGVGVIVTPEQIEEAVEAAINRHRPQLLVERYHFNMGLLMGEARAVLKWADGKMIKNEVDMQVLHLLGPKLEADLEKKFKVAKARLEETDRRTAKDVVENGETADQTLSLMEQLRGEALKFHKPGENYKTPGYVVTPHTMNLLKQHLEITGGQVRTRFPPEPNGILHIGHAKAINFNFGYAKANNGICFLRFDDTNPEKEEAKFFTAICDMVAWLGYTPYKVTYASDYFDQLYAWAVELIRRGLAYVCHQRGEELKGHNTLPSPWRDRPMEESLLLFEAMRKGKFSEGEATLRMKLVMEDGKMDPVAYRVKYTPHHRTGDKWCIYPTYDYTHCLCDSIEHITHSLCTKEFQARRSSYFWLCNALDVYCPVQWEYGRLNLHYAVVSKRKILQLVATGAVRDWDDPRLFTLTALRRRGFPPEAINNFCARVGVTVAQTTMEPHLLEACVRDVLNDTAPRAMAVLESLRVIITNFPAAKSLDIQVPNFPADETKGFHQVPFAPIVFIERTDFKEEPEPGFKRLAWGQPVGLRHTGYVIELQHVVKGPSGCVESLEVTCRRADAGEKPKAFIHWVSQPLMCEVRLYERLFQHKNPEDPTEVPGGFLSDLNLASLHVVDAALVDCSVALAKPFDKFQFERLGYFSVDPDSHQGKLVFNRTVTLKEDPGKV

SEQ ID NO: 455 - protein, 644 aa, Homo Sapiens
MSRQFSSRSGYRSGGGFSSGSAGIINYQRRTTSSSTRRSGGGGGRFSSCGGGGGSFGAGGGFGSRSLVNLGGSKSISISVARGGGRGSGFGGGYGGGGFGGGGFGGGGFGGGGIGGGGFGGFGSGGGGFGGGGFGGGGYGGGYGPVCPPGGIQEVTINQSLLQPLNVEIDPEIQKVKSREREQIKSLNNQFASFIDKVRFLEQQNQVLQTKWELLQQVDTSTRTHNLEPYFESFINNLRRRVDQLKSDQSRLDSELKNMQDMVEDYRNKYEDEINKRTNAENEFVTIKKDVDGAYMTKVDLQAKLDNLQQEIDFLTALYQAELSQMQTQISETNVILSMDNNRSLDLDSIIAEVKAQYEDIAQKSKAEAESLYQSKYEELQITAGRHGDSVRNSKIEISELNRVIQRLRSEIDNVKKQISNLQQSISDAEQRGENALKDAKNKLNDLEDALQQAKEDLARLLRDYQELMNTKLALDLEIATYRTLLEGEESRMSGECAPNVSVSVSTSHTTISGGGSRGGGGGGYGSGGSSYGSGGGSYGSGGGGGGGRGSYGSGGSSYGSGGGSYGSGGGGGGHGSYGSGSSSGGYRGGSGGGGGGSSGGRGSGGGSSGGSIGGRGSSSGGVKSSGGSSSVKFVSTTYSGVTR

SEQ ID NO: 456 - protein, 242 aa, Homo Sapiens
MAETEALSKLREDFRMQNKSVFILGASGETGRVLLKEILEQGLFSKVTLIGRRKLTFDEEAYKNVNQEVVDFEKLDDYASAFQGHDVGFCCLGTTRGKAGAEGFVRVDRDYVLKSAELAKAGGCKHFNLLSSKGADKSSNFLYLQVKGEVEAKVEELKFDRYSVFRPGVLLCDRQESRPGEWLVRKFFGSLPDSWASGHSVPVVTVVRAMLNNVVRPRDKQMELLENKAIHDLGKAHGSLKP

SEQ ID NO: 457 - protein, 4128 aa, Homo Sapiens [sequence omitted]

SEQ ID NO: 458 - protein, 630 aa, Homo Sapiens
MAELCPLAEELSCSICLEPFKEPVTTPCGHNFCGSCLNETWAVQGSPYLCPQCRAVYQARPQLHKNTVLCNVVEQFLQADLAREPPADVWTPPARASAPSPNAQVACDHCLKEAAVKTCLVCMASFCQEHLQPHFDSPAFQDHPLQPPVRDLLRRKCSQHNRLREFFCPEHSECICHICLVEHKTCSPASLSQASADLEATLRHKLTVMYSQINGASRALDDVRNRQQDVRMTANRKVEQLQQEYTEMKALLDASETTSTRKIKEEEKRVNSKFDTIYQILLKKKSEIQTLKEEIEQSLTKRDEFEFLEKASKLRGISTKPVYIPEVELNHKLIKGIHQSTIDLKNELKQCIGRLQEPTPSSGDPGEHDPASTHKSTRPVKKVSKEEKKSKKPPPVPALPSKLPTFGAPEQLVDLKQAGLEAAAKATSSHPNSTSLKAKVLETFLAKSRPELLEYYIKVILDYNTAHNKVALSECYTVASVAEMPQNYRPHPQRFTYCSQVLGLHCYKKGIHYWEVELQKNNFCGVGICYGSMNRQGPESRLGRNSASWCVEWFNTKISAWHNNVEKTLPSTKATRVGVLLNCDHGFVIFFAVADKVHLMYKFRVDFTEALYPAFWVFSAGATLSICSPK

SEQ ID NO: 459 - protein, 908 aa, Homo Sapiens
MEEGGRDKAPVQPQQSPAAAPGGTDEKPSGKERRDAGDKDKEQELSEEDKQLQDELEMLVERLGEKDTSLYRPALEELRRQIRSSTTSMTSVPKPLKFLRPHYGKLKEIYENMAPGENKRFAADIISVLAMTMSGERECLKYRLVGSQEELASWGHEYVRHLAGEVAKEWQELDDAEKVQREPLLTLVKEIVPYNMAHNAEHEACDLLMEIEQVDMLEKDIDENAYAKVCLYLTSCVNYVPEPENSALLRCALGVFRKFSRFPEALRLALMLNDMELVEDIFTSCKDVVVQKQMAFMLGRHGVFLELSEDVEEYEDLTEIMSNVQLNSNFLALARELDIMEPKVPDDIYKTHLENNRFGGSGSQVDSARMNLASSFVNGFVNAAFGQDKLLTDDGNKWLYKNKDHGMLSAAASLGMILLWDVDGGLTQIDKYLYSSEDYIKSGALLACGIVNSGVRNECDPALALLSDYVLHNSNTMRLGSIFGLGLAYAGSNREDVLTLLLPVMGDSKSSMEVAGVTALACGMIAVGSCNGDVTSTILQTIMEKSETELKDTYARWLPLGLGLNHLGKGEAIEAILAALEVVSEPFRSFANTLVDVCAYAGSGNVLKVQQLLHICSEHFDSKEKEEDKDKKEKKDKDKKEAPADMGAHQGVAVLGIALIAMGEEIGAEMALRTFGHLLRYGEPTLRRAVPLALALISVSNPRLNILDTLSKFSHDADPEVSYNSIFAMGMVGSGTNNARLAAMLRQLAQYHAKDPNNLFMVRLAQGLTHLGKGTLTLCPYHSDRQLMSQVAVAGLLTVLVSFLDVRNIILGKSHYVLYGLVAAMQPRMLVTFDEELRPLPVSVRVGQAVDVVGQAGKPKTITGFQTHTTPVLLAHGERAELATEEFLPVTPILEGFVILRKNPNYDL

SEQ ID NO: 460 - protein, 288 aa, Homo Sapiens
MSDSGEQNYGERESRSASRSGSAHGSGKSARHTPARSRSKEDSRRSRSKSRSRSESRSRSRRSSRRHYTRSRSRSRSHRRSRSRSYSRDYRRRHSHSHSPMSTRRRHVGNRANPDPNCCLGVFGLSLYTTERDLREVFSKYGPIADVSIVYDQQSRRSRGFAFVYFENVDDAKEAKERANGMELDGRRIRVDFSITKRPHTPTPGIYMGRPTYGSSRRRDYYDRGYDRGYDDRDYYSRSYRGGGGGGGGWRAAQDRDQIYRRRSPSPYYSRGGYRSRSRSRSYSPRRY

SEQ ID NO: 461 - protein, 391 aa, Homo Sapiens
MADIDNKEQSELDQDLDDVEEVEEEETGEETKLKARQLTVQMMQNPQILAALQERLDGLVETPTGYIESLPRVVKRRVNALKNLQVKCAQIEAKFYEEVHDLERKYAVLYQPLFDKRFEIINAIYEPTEEECEWKPDEEDEISEELKEKAKIEDEKKDEEKEDPKGIPEFWLTVFKNVDLLSDMVQEHDEPILKHLKDIKVKFSDAGQPMSFVLEFHFEPNEYFTNEVLTKTYRMRSEPDDSDPFSFDGPEIMGCTGCQIDWKKGKNVTLKTIKKKQKHKGRGTVRTVTKTVSNDSFFNFFAPPEVPESGDLDDDAEAILAADFEIGHFLRERIIPRSVLYFTGEAIEDDDDDYDEEGEEADEEGEEEGDEENDPDYDPKKDQNPAECKQQ

SEQ ID NO: 462 - protein, 309 aa, Homo Sapiens
MDEKVFTKELDQWIEQLNECKQLSESQVKSLCEKAKEILTKESNVQEVRCPVTVCGDVHGQFHDLMELFRIGGKSPDTNYLFMGDYVDRGYYSVETVTLLVALKVRYRERITILRGNHESRQITQVYGFYDECLRKYGNANVWKYFTDLFDYLPLTALVDGQIFCLHGGLSPSIDTLDHIRALDRLQEVPHEGPMCDLLWSDPDDRGGWGISPRGAGYTFGQDISETFNHANGLTLVSRAHQLVMEGYNWCHDRNVVTIFSAPNYCYRCGNQAAIMELDDTLKYSFLQFDPAPRRGEPHVTRRTPDYFL

SEQ ID NO: 463 - protein, 231 aa, Homo Sapiens
MSGEENPASKPTPVQDVQGDGRWMSLHHRFVADSKDKEPEVVFIGDSLVQLMHQCEIWRELFSPLHALNFGIGGDGTQHVLWRLENGELEHIRPKIVVVWVGTNNHGHTAEQVTGGIKAIVQLVNERQPQARVVVLGLLPRGQHPNPLREKNRQVNELVRAALAGHPRAHFLDADPGFVHSDGTISHHDMYDYLHLSRLGYTPVCRALHSLLLRLLAQDQGQGAPLLEPAP

SEQ ID NO: 464 - protein, 84 aa, Homo Sapiens
MPYLLISTQIRMEVGPTMVGDEQSDPELMQHLGASKRRALGNNFYEYYVDDPPRIVLDKLERRGFRVLSMTGVGQTLVWCLHKE

SEQ ID NO: 465 - protein, 758 aa, Homo Sapiens
MAVSAGSARTSPSSDKVQKDKAELISGPRQDSRIGKLLGFEWTDLSSWRRLVTLLNRPTDPASLAVFRFLFGFLMVLDIPQERGLSSLDRKYLDGLDVCRFPLLDALRPLPLDWMYLVYTIMFLGALGMMLGLCYRISCVLFLLPYWYVFLLDKTSWNNHSYLYGLLAFQLTFMDANHYWSVDGLLNAHRRNAHVPLWNYAVLRGQIFIVYFIAGVKKLDADWVEGYSMEYLSRHWLFSPFKLLLSEELTSLLVVHWGGLLLDLSAGFLLFFDVSRSIGLFFVSYFHCMNSQLFSIGMFSYVMLASSPLFCSPEWPRKLVSYCPRRLQQLLPLKAAPQPSVSCVYKRSRGKSGQKPGLRHQLGAAFTLLYLLEQLFLPYSHFLTQGYNNWTNGLYGYSWDMMVHSRSHQHVKITYRDGRTGELGYLNPGVFTQSRRWKDHADMLKQYATCLSRLLPKYNVTEPQIYFDIWVSINDRFQQRIFDPRVDIVQAAWSPFQRTSWVQPLLMDLSPWRAKLQEIKSSLDNHTEVVFIADFPGLHLENFVSEDLGNTSIQLLQGEVTVELVAEQKNQTLREGEKMQLPAGEYHKVYTTSPSPSCYMYVYVNTTELALEQDLAYLQELKEKVENGSETGPLPPELQPLLEGEVKGGPEPTPLVQTFLRRQQRLQEIERRRNTPFHERFFRFLLRKLYVFRRSFLMTCISLRNLILGRPSLEQLAQEVTYANLRPFEAVGELNPSNTDSSHSNPPESNPDPVHSEF

SEQ ID NO: 466 - protein, 158 aa, Homo Sapiens
MAEQATKSVLFVCLGNICRSPIAEAVFRKLVTDQNISENWRVDSAATSGYEIGNPPDYRGQSCMKRHGIPMSHVARQITKEDFATFDYILCMDESNLRDLNRKSNQVKTCKAKIELLGSYDPQKQLIIEDPYYGNDSDFETVYQQCVRCCRAFLEKAH

SEQ ID NO: 467 - protein, 847 aa, Homo Sapiens
MSKSFQQSSLSRDSQGHGRDLSAAGIGLLAAATQSLSMPASLGRMNQGTARLASLMNLGMSSSLNQQGAHSALSSASTSSHNLQSIFNIGSRGPLPLSSQHRGDADQASNILASFGLSARDLDELSRYPEDKITPENLPQILLQLKRRRTEEGPTLSYGRDGRSATREPPYRVPRDDWEEKRHFRRDSFDDRGPSLNPVLDYDHGSRSQESGYYDRMDYEDDRLRDGERCRDDSFFGETSHNYHKFDSEYERMGRGPGPLQERSLFEKKRGAPPSSNIEDFHGLLPKGYPHLCSICDLPVHSNKEWSQHINGASHSRRCQLLLEIYPEWNPDNDTGHTMGDPFMLQQSTNPAPGILGPPPPSFHLGGPAVGPRGNLGAGNGNLQGPRHMQKGRVETSRVVHIMDFQRGKNLRYQLLQLVEPFGVISNHLILNKINEAFIEMATTEDAQAAVDYYTTTPALVFGKPVRVHLSQKYKRIKKPEGKPDQKFDQKQELGRVIHLSNLPHSGYSDSAVLKLAEPYGKIKNYILMRMKSQAFIEMETREDAMAMVDHCLKKALWFQGRCVKVDLSEKYKKLVLRIPNRGIDLLKKDKSRKRSYSPDGKESPSDKKSKTDGSQKTESSTEGKEQEEKSGEDGEKDTKDDQTEQEPNMLLESEDELLVDEEEAAALLESGSSVGDETDLANLGDVASDGKKEPSDKAVKKDGSASAAAKKKLKKVDKIEELDQENEAALENGIKNEENTEPGAESSENADDPNKDTSENADGQSDENKDDYTIPDEYRIGPYQPNVPVGIDYVIPKTGFYCKLCSLFYTNEEVAKNTHCSSLPHYQKLKKFLNKLAEERRQKKET

SEQ ID NO: 468 - protein, 870 aa, Homo Sapiens
MGNRGMEELIPLVNKLQDAFSSIGQSCHLDLPQIAVVGGQSAGKSSVLENFVGRDFLPRGSGIVTRRPLILQLIFSKTEHAEFLHCKSKKFTDFDEVRQEIEAETDRVTGTNKGISPVPINLRVYSPHVLNLTLIDLPGITKVPVGDQPPDIEYQIKDMILQFISRESSLILAVTPANMDLANSDALKLAKEVDPQGLRTIGVITKLDLMDEGTDARDVLENKLLPLRRGYIGVVNRSQKDIEGKKDIRAALAAERKFFLSHPAYRHMADRMGTPHLQKTLNQQLTNHIRESLPALRSKLQSQLLSLEKEVEEYKNFRPDDPTRKTKALLQMVQQFGVDFEKRIEGSGDQVDTLELSGGARINRIFHERFPFELVKMEFDEKDLRREISYAIKNIHGVRTGLFTPDLAFEAIVKKQVVKLKEPCLKCVDLVIQELINTVRQCTSKLSSYPRLREETERIVTTYIREREGRTKDQILLLIDIEQSYINTNHEDFIGFANAQQRSTQLNKKRAIPNQGEILVIRRGWLTINNISLMKGGSKEYWFVLTAESLSWYKDEEEKEKKYMLPLDNLKIRDVEKGFMSNKHVFAIFNTEQRNVYKDLRQIELACDSQEDVDSWKASFLRAGVYPEKDQAENEDGAQENTFSMDPQLERQVETIRNLVDSYVAIINKSIRDLMPKTIMHLMINNTKAFIHHELLAYLYSSADQSSLMEESADQAQRRDDMLRMYHALKEALNIIGDISTSTVSTPVPPPVDDTWLQSASSHSPTPQRRPVSSIHPPGRPPAVRGPTPGPPLIPVPVGAAASFSAPPIPSRPGPQSVFANSDLFPAPPQIPSRPVRIPPGIPPGVPSRRPPAAPSRPTIIRPAEPSLLD

SEQ ID NO: 469 - protein, 1231 aa, Homo Sapiens
MRLLAKIICLMLWAICVAEDCNELPPRRNTEILTGSWSDQTYPEGTQAIYKCRPGYRSLGNVIMVCRKGEWVALNPLRKCQKRPCGHPGDTPFGTFTLTGGNVFEYGVKAVYTCNEGYQLLGEINYRECDTDGWTNDIPICEVVKCLPVTAPENGKIVSSAMEPDREYHFGQAVRFVCNSGYKIEGDEEMHCSDDGFWSKEKPKCVEISCKSPDVINGSPISQKIIYKENERFQYKCNMGYEYSERGDAVCTESGWRPLPSCEEKSCDNPYIPNGDYSPLRIKHRTGDEITYQCRNGFYPATRGNTAKCTSTGWIPAPRCTLKPCDYPDIKHGGLYHENMRRPYFPVAVGKYYSYYCDEHFETPSGSYWDHIHCTQDGWSPAVPCLRKCYFPYLENGYNQNYGRKFVQGKSIDVACHPGYALPKAQTTVTCMENGWSPTPRCIRVKTCSKSSIDIENGFISESQYTYALKEKAKYQCKLGYVTADGETSGSITCGKDGWSAQPTCIKSCDIPVFMNARTKNDFTWFKLNDTLDYECHDGYESNTGSTTGSIVCGYNGWSDLPICYERECELPKIDVHLVPDRKKDQYKVGEVLKFSCKPGFTIVGPNSVQCYHFGLSPDLPICKEQVQSCGPPPELLNGNVKEKTKEEYGHSEVVEYYCNPRFLMKGPNKIQCVDGEWTTLPVCIVEESTCGDIPELEHGWAQLSSPPYYYGDSVEFNCSESFTMIGHRSITCIHGVWTQLPQCVAIDKLKKCKSSNLIILEEHLKNKKEFDHNSNIRYRCRGKEGWIHTVCINGRWDPEVNCSMAQIQLCPPPPQIPNSHNMTTTLNYRDGEKVSVLCQENYLIQEGEEITCKDGRWQSIPLCVEKIPCSQPPQIEHGTINSSRSSQESYAHGTKLSYTCEGGFRISEENETTCYMGKWSSPPQCEGLPCKSPPEISHGVVAHMSDSYQYGEEVTYKCFEGFGIDGPAIAKCLGEKWSHPPSCIKTDCLSLPSFENAIPMGEKKDVYKAGEQVTYTCATYYKMDGASNVTCINSRWTGRPTCRDTSCVNPPTVQNAYIVSRQMSKYPSGERVRYQCRSPYEMFGDEEVMCLNGNWTEPPQCKDSTGKCGPPPPIDNGDITSFPLSVYAPASSVEYQCQNLYQLEGNKRITCRNGQWSEPPKCLHPCVISREIMENYNIALRWTAKQKLYSRTGESVEFVCKRGYRLSSRSHTLRTTCWDGKLEYPTCAKR

SEQ ID NO: 470 - protein, 174 aa, Homo Sapiens
MADVLDLHEAGGEDFAMDEDGDESIHKLKEKAKKRKGRGFGSEEGSRARMREDYDSVEQDGDEPGPQRSVEGWILFVTGVHEEATEEDIHDKFAEYGEIKNIHLNLDRRTGYLKGYTLVEYETYKEAQAAMEGLNGQDLMGQPISVDWCFVRGPPKGKRRGGRRRSRSPDRRRR

SEQ ID NO: 471 - protein, 82 aa, Homo Sapiens
MPQYQTWEEFSRAAEKLYLADPMKARVVLKYRHSDGNLCVKVTDDLVRQCLALLLRLQCSGMIIAHCILDLLGSSGPLASAS

SEQ ID NO: 472 - protein, 509 aa, Homo Sapiens
MAERAALEELVKLQGERVRGLKQQKASAELIEEEVAKLLKLKAQLGPDESKQKFVLKTPKGTRDYSPRQMAVREKVFDVIIRCFKRHGAEVIDTPVFELKETLMGKYGEDSKLIYDLKDQGGELLSLRYDLTVPFARYLAMNKLTNIKRYHIAKVYRRDNPAMTRGRYREFYQCDFDIAGNFDPMIPDAECLKIMCEILSSLQIGDFLVKVNDRRILDGMFAICGVSDSKFRTICSSVDKLDKVSWEEVKNEMVGEKGLAPEVADRIGDYVQQHGGVSLVEQLLQDPKLSQNKQALEGLGDLKLLFEYLTLFGIDDKISFDLSLARGLDYYTGVIYEAVLLQTPAQAGEEPLGVGSVAAGGRYDGLVGMFDPKGRKVPCVGLSIGVERIFSIVEQRLEALEEKIRTTETQVLVASAQKKLLEERLKLVSELWDAGIKAELLYKKNPKLLNQLQYCEEAGIPLVAIIGEQELKDGVIKLRSVTSREEVDVRREDLVEEIKRRTGQPLCIC

SEQ ID NO: 473 - protein, 316 aa, Homo Sapiens
MTGNAGEWCLMESDPGVFTELIKGFGCRGAQVEEIWSLEPENFEKLKPVHGLIFLFKWQPGEEPAGSVVQDSRLDTIFFAKQVINNACATQAIVSVLLNCTHQDVHLGETLSEFKEFSQSFDAAMKGLALSNSDVIRQVHNSFARQQMFEFDTKTSAKEEDAFHFVSYVPVNGRLYELDGLREGPIDLGACNQDDWISAVRPVIEKRIQKYSEGEIRFNLMAIVSDRKMIYEQKIAELQRQLAEEPMDTDQGNSMLSAIQSEVAKNQMLIEEEVQKLKRYKIENIRRKHNYLPFIMELLKTLAEHQQLIPLVEKGK

SEQ ID NO: 474 - protein, 906 aa, Homo Sapiens
MTAVHAGNINFKWDPKSLEIRTLAVERLLEPLVTQVTTLVNTNSKGPSNKKRGRSKKAHVLAASVEQATENFLEKGDKIAKESQFLKEELVAAVEDVRKQGDLMKAAAGEFADDPCSSVKRGNMVRAARALLSAVTRLLILADMADVYKLLVQLKVVEDGILKLRNAGNEQDLGIQYKALKPEVDKLNIMAAKRQQELKDVGHRDQMAAARGILQKNVPILYTASQACLQHPDVAAYKANRDLIYKQLQQAVTGISNAAQATASDDASQHQGGGGGELAYALNNFDKQIIVDPLSFSEERFRPSLEERLESIISGAALMADSSCTRDDRRERIVAECNAVRQALQDLLSEYMGNAGRKERSDALNSAIDKMTKKTRDLRRQLRKAVMDHVSDSFLETNVPLLVLIEAAKNGNEKEVKEYAQVFREHANKLIEVANLACSISNNEEGVKLVRMSASQLEALCPQVINAALALAAKPQSKLAQENMDLFKEQWEKQVRVLTDAVDDITSIDDFLAVSENHILEDVNKCVIALQEKDVDGLDRTAGAIRGRAARVIHVVTSEMDNYEPGVYTEKVLEATKLLSNTVMPRFTEQVEAAVEALSSDPAQPMDENEFIDASRLVYDGIRDIRKAVLMIRTPEELDDSDFETEDFDVRSRTSVQTEDDQLIAGQSARAIMAQLPQEQKAKIAEQVASFQEEKSKLDAEVSKWDDSGNDIIVLAKQMCMIMMEMTDFTRGKGPLKNTSDVISAAKKIAEAGSRMDKLGRTIADHCPDSACKQDLLAYLQRIALYCHQLNICSKVKAEVQNLGGELVVSGVDSAMSLIQAAKNLMNAVVQTVKASYVASTKYQKSQGMASLNLPAVSWKMKAPEKKPLVKREKQDETQTKIKRASQKKHVNPVQALSEFKAMDSI

SEQ ID NO: 475 - protein, 263 aa, Homo Sapiens
MALASVLERPLPVNQRGFFGLGGRADLLDLGPGSLSDGLSLAAPGWGVPEEPGIEMLHGTTTLAFKFRHGVIVAADSRATAGAYIASQTVKKVIEINPYLLGTMAGGAADCSFWERLLARQCRIYELRNKERISVAAASKLLANMVYQYKGMGLSMGTMICGWDKRGPGLYYVDSEGNRISGATFSVGSGSVYAYGVMDRGYSYDLEVEQAYDLARRAIYQATYRDAYSGGAVNLYHVREDGWIRVSSDNVADLHEKYSGSTP

SEQ ID NO: 476 - protein, 796 aa, Homo Sapiens
MPTTQQSPQDEQEKLLDEAIQAVKVQSFQMKRCLDKNKLMDALKHASNMLGELRTSMLSPKSYYELYMAISDELHYLEVYLTDEFAKGRKVADLYELVQYAGNIIPRLYLLITVGVVYVKSFPQSRKDILKDLVEMCRGVQHPLRGLFLRNYLLQCTRNILPDEGEPTDEETTGDISDSMDFVLLNFAEMNKLWVRMQHQGHSRDREKRERERQELRILVGTNLVRLSQLEGVNVERYKQIVLTGILEQVVNCRDALAQEYLMECIIQVFPDEFHLQTLNPFLRACAELHQNVNVKNIIIALIDRLALFAHREDGPGIPADIKLFDIFSQQVATVIQSRQDMPSEDVVSLQVSLINLAMKCYPDRVDYVDKVLETTVEIFNKLNLEHIATSSAVSKELTRLLKIPVDTYNNILTVLKLKHFHPLFEYFDYESRKSMSCYVLSNVLDYNTEIVSQDQVDSIMNLVSTLIQDQPDQPVEDPDPEDFADEQSLVGRFIHLLRSEDPDQQYLILNTARKHFGAGGNQRIRFTLPPLVFAAYQLAFRYKENSKVDDKWEKKCQKIFSFAHQTISALIKAELAELPLRLFLQGALAAGEIGFENHETVAYEFMSQAFSLYEDEISDSKAQLAAITLIIGTFERMKCFSEENHEPLRTQCALAASKLLKKPDQGRAVSTCAHLFWSGRNTDKNGEELHGGKRVMECLKKALKIANQCMDPSLQVQLFIEILNRYIYFYEKENDAVTIQVLNQLIQKIREDLPNLESSEETEQINKHFHNTLEHLRLRRESPESEGPIYEGLIL

SEQ ID NO: 477 - protein, 1101 aa, Homo Sapiens
MSAKAISEQTGKELLYKFICTTSAIQNRFKYARVTPDTDWARLLQDHPWLLSQNLVVKPDQLIKRRGKLGLVGVNLTLDGVKSWLKPRLGQEATVGKATGFLKNFLIEPFVPHSQAEEFYVCIYATREGDYVLFHHEGGVDVGDVDAKAQKLLVGVDEKLNPEDIKKHLLVHAPEDKKEILASFISGLFNFYEDLYFTYLEINPLVVTKDGVYVLDLAAKVDATADYICKVKWGDIEFPPPFGREAYPEEAYIADLDAKSGASLKLTLLNPKGRIWTMVAGGGASVVYSDTICDLGGVNELANYGEYSGAPSEQQTYDYAKTILSLMTREKHPDGKILIIGGSIANFTNVAATFKGIVRAIRDYQGPLKEHEVTIFVRRGGPNYQEGLRVMGEVGKTTGIPIHVFGTETHMTAIVGMALGHRPIPNQPPTAAHTANFLLNASGSTSTPAPSRTASFSESRADEVAPAKKAKPAMPQDSVPSPRSLQGKSTTLFSRHTKAIVWGMQTRAVQGMLDFDYVCSRDEPSVAAMVYPFTGDHKQKFYWGHKEILIPVFKNMADAMRKHPEVDVLINFASLRSAYDSTMETMNYAQIRTIAIIAEGIPEALTRKLIKKADQKGVTIIGPATVGGIKPGCFKIGNTGGMLDNILASKLYRPGSVAYVSRSGGMSNELNNIISRTTDGVYEGVAIGGDRYPGSTFMDHVLRYQDTPGVKMIVVLGEIGGTEEYKICRGIKEGRLTKPIVCWCIGTCATMFSSEVQFGHAGACANQASETAVAKNQALKEAGVFVPRSFDELGEIIQSVYEDLVANGVIVPAQEVPPPTVPMDYSWARELGLIRKPASFMTSICDERGQELIYAGMPITEVFKEEMGIGGVLGLLWFQKRLPKYSCQFIEMCLMVTADHGPAVSGAHNTIICARAGKDLVSSLTSGLLTIGDRFGGALDAAAKMFSKAFDSGIIPMEFVNKMKKEGKLIMGIGHRVKSINNPDMRVQILKDYVRQHFPATPLLDYALEVEKITTSKKPNLILNVDGLIGVAFVDMLRNCGSFTREEADEYIDIGALNGIFVLGRSMGFIGHYLDQKRLKQGLYRHPWDDISYVLPEHMSM

SEQ ID NO: 478 - protein, 135 aa, Homo Sapiens
MAAAAVSGALGRAGWRLLQLRCLPVARCRQALVPRAFHASAVGLRSSDEQKQQPPNSFSQQHSETQGAEKPDPESSHSPPRYTDQGGEEEEDYESEEQLQHRILTAALEFVPAHGWTAEAIAEGAQVCIGEGGAT

SEQ ID NO: 479 - protein, 291 aa, Homo Sapiens
MACLSPSQLQKFQQDGFLVLEGFLSAEECVAMQQRIGEIVAEMDVPLHCRTEFSTQEEEQLRAQGSTDYFLSSGDKIRFFFEKGVFDEKGNFLVPPEKSINKIGHALHAHDPVFKSITHSFKVQTLARSLGLQMPVVVQSMYIFKQPHFGGEVSPHQDASFLYTEPLGRVLGVWIAVEDATLENGCLWFIPGSHTSGVSRRMVRAPVGSAPGTSFLGSEPARDNSLFVPTPVQRGALVLIHGEVVHKSKQNLSDRSRQAYTFHLMEASGTTWSPENWLQPTAELPFPQLYT

SEQ ID NO: 480 - protein, 136 aa, Homo Sapiens
MVLLESEQFLTELTRLFQKCRTSGSVYITLKKYDGRTKPIPKKGTVEGFEPADNKCLLRATDGKKKISTVVSSKEVNKFQMAYSNLLRANMDGLKKRDKKNKTKKTKAAAAAAAAAPAAAATAPTTAATTAATAAQ

SEQ ID NO: 481 - protein, 918 aa, Homo Sapiens
MASLSRALRVAAAHPRQSPTRGMGPCNLSSAAGPTAEKSVPYQRTLKEGQGTSVVAQGPSRPLPSTANVVVIGGGSLGCQTLYHLAKLGMSGAVLLERERLTSGTTWHTAGLLWQLRPSDVEVELLAHTRRVVSRELEEETGLHTGWIQNGGLFIASNRQRLDEYKRLMSLGKAYGVESHVLSPAETKTLYPLMNVDDLYGTLYVPHDGTMDPAGTCTTLARAASARGAQVIENCPVTGIRVWTDDFGVRRVAGVETQHGSIQTPCVVNCAGVWASAVGRMAGVKVPLVAMHHAYVVTERIEGIQNMPNVRDHDASVYLRLQGDALSVGGYEANPIFWEEVSDKFAFGLFDLDWEVFTQHIEGAINRVPVLEKTGIKSTVCGPESFTPDHKPLMGEAPELRGFFLGCGFNSAGMMLGGGCGQELAHWIIHGRPEKDMHGYDIRRFHHSLTDHPRWIRERSHESYAKNYSVVFPHDEPLAGRNMRRDPLHEELLGQGCVFQERHGWERPGWFHPRGPAPVLEYDYYGAYGSRAHEDYAYRRLLADEYTFAFPPHHDTIKKECLACRGAAAVFDMSYFGKFYLVGLDARKAADWLFSADVSRPPGSTVYTCMLNHRGGTESDLTVSRLAPSHQASPLAPAFEGDGYYLAMGGAVAQHNWSHITTVLQDQKSQCQLIDSSEDLGMISIQGPASRAILQEVLDADLSNEAFPFSTHKLLRAAGHLVRAMRLSFVGELGWELHIPKASCVPVYRAVMAAGAKHGLINAGYRAIDSLSIEKGYRHWHADLRPDDSPLEAGLAFTCKLKSPVPFLGREALEQQRAAGLRRRLVCFTMEDKVPMFGLEAIWRNGQVVGHVRRADFGFAIDKTIAYGYIHDPSGGPVSLDFVKSGDYALERMGVTYGAQAHLKSPFDPNNKRVKGIY

SEQ ID NO: 482 - protein, 752 aa, Homo Sapiens [sequence omitted]

SEQ ID NO: 483 - protein, 399 aa, Homo Sapiens
MGRKSLYLLIVGILIAYYIYTPLPDNVEEPWRMMWINAHLKTIQNLATFVELLGLHHFMDSFKVVGSFDEVPPTSDENVTVTETKFNNILVRVYVPKRKSEALRRGLFYIHGGGWCVGSAALSGYDLLSRWTADRLDAVVVSTNYRLAPKYHFPIQFEDVYNALRWFLRKKVLAKYGVNPERIGISGDSAGGNLAAAVTQQLLDDPDVKIKLKIQSLIYPALQPLDVDLPSYQENSNFLFLSKSLMVRFWSEYFTTDRSLEKAMLSRQHVPVESSHLFKFVNWSSLLPERFIKGHVYNNPNYGSSELAKKYPGFLDVRAAPLLADDNKLRGLPLTYVITCQYDLLRDDGLMYVTRLRNTGVQVTHNHVEDGFHGAFSFLGLKISHRLINQYIEWLKENL

SEQ ID NO: 484 - protein, 178 aa, Homo Sapiens
MPSATSHSGSGSKSSGPPPPSGSSGSEAAAGAGAAAPASQHPATGTGAVQTEAMKQILGVIDKKLRNLEKKKGKLDDYQERMNKGERLNQDQLDAVSKYQEVTNNLEFAKELQRSFMALSQDIQKTIKKTARREQLMREEAEQKRNNLFKYRPDYSIIIPSCCVSASSISGWDKQTFT

SEQ ID NO: 485 - protein, 472 aa, Homo Sapiens
MAGGEAGVTLGQPHLSRQDLTTLDVTKLTPLSHEVISRQATINIGTIGHVAHGKSTVVKAISGVHTVRFKNELERNITIKLGYANAKIYKLDDPSCPRPECYRSCGSSTPDEFPTDIPGTKGNFKLVRHVSFVDCPGHDILMATMLNGAAVMDAALLLIAGNESCPQPQTSEHLAAIEIMKLKHILILQNKIDLVKESQAKEQYEQILAFVQGTVAEGAPIIPISAQLKYNIEVVCEYIVKKIPVPPRDFTSEPRLIVIRSFDVNKPGCEVDDLKGGVAGGSILKGVLKVGQEIEVRPGIVSKDSEGKLMCKPIFSKIVSLFAEHNDLQYAAPGGLIGVGTKIDPTLCRADRMVGQVLGAVGALPEIFTELEISYFLLRRLLGVRTEGDKKAAKVQKLSKNEVLMVNIGSLSTGGRVSAVKADLGKIVLTNPVCTEVGEKIALSRRVEKHWRLIGWGQIRRGVTIKPTVDDD

SEQ ID NO: 486 - protein, 889 aa, Homo Sapiens
MSNPFAHLAEPLDPVQPGKKFFNLNKLEDSRYGRLPFSIRVLLEAAIRNCDEFLVKKQDIENILHWNVTQHKNIEVPFKPARVILQDFTGVPAVVDFAAMRDAVKKLGGDPEKINPVCPADLVIDHSIQVDFNRRADSLQKNQDLEFERNRERFEFLKWGSQAFHNMRIIPPGSGIIHQVNLEYLARVVFDQDGYYYPDSLVGTDSHTTMIDGLGILGWGVGGIEAEAVMLGQPISMVLPQVIGYRLMGKPHPLVTSTDIVLTITKHLRQVGVVGKFVEFFGPGVAQLSIADRATIANMCPEYGATAAFFPVDEVSITYLVQTGRDEEKLKYIKKYLQAVGMFRDFNDPSQDPDFTQVVELDLKTVVPCCSGPKRPQDKVAVSDMKKDFESCLGAKQGFKGFQVAPEHHNDHKTFIYDNTEFTLAHGSVVIAAITSCTNTSNPSVMLGAGLLAKKAVDAGLNVMPYIKTSLSPGSGVVTYYLQESGVMPYLSQLGFDVVGYGCMTCIGNSGPLPEPVVEAITQGDLVAVGVLSGNRNFEGRVHPNTRANYLASPPLVIAYAIAGTIRIDFEKEPLGVNAKGQQVFLKDIWPTRDEIQAVERQYVIPGMFKEVYQKIETVNESWNALATPSDKLFFWNSKSTYIKSPPFFENLTLDLQPPKSIVDAYVLLNLGDSVTTDHISPAGNIARNSPAARYLTNRGLTPREFNSYGSRRGNDAVMARGTFANIRLLNRFLNKQAPQTIHLPSGEILDVFDAAERYQQAGLPLIVLAGKEYGAGSSRDWAAKGPFLLGIKAVLAESYERIHRSNLVGMGVIPLEYLPGENADALGLTGQERYTIIIPENLKPQMKVQVKLDTGKTFQAVMRFDTDVELTYFLNGGILNYMIRKMAK

SEQ ID NO: 487 - protein, 471 aa, Homo Sapiens
MQSNKTFNLEKQNHTPRKHHQHHHQQQHHQQQQQQPPPPPIPANGQQASSQNEGLTIDLKNFRKPGEKTFTQRSRLFVGNLPPDITEEEMRKLFEKYGKAGEVFIHKDKGFGFIRLETRTLAEIAKVELDNMPLRGKQLRVRFACHSASLTVRNLPQYVSNELLEEAFSVFGQVERAVVIVDDRGRPSGKGIVEFSGKPAARKALDRCSEGSFLLTTFPRPVTVEPMDQLDDEEGLPEKLVIKNQQFHKEREQPPRFAQPGSFEYEYAMRWKALIEMEKQQQDQVDRNIKEAREKLEMEMEAARHEHQVMLMRQDLMRRQEELRRMEELHNQEVQKRKQLELRQEEERRRREEEMRRQQEEMMRRQQEGFKGTFPDAREQEIRMGQMAMGGAMGINNRGAMPPAPVPAGTPAPPGPATMMPDGTLGLTPPTTERFGQAATMEGIGAIGGTPPAFNRAAPGAEFAPNKRRRY

SEQ ID NO: 488 - protein, 372 aa, Homo Sapiens
MAYHSFLVEPISCHAWNKDRTQIAICPNNHEVHIYEKSGAKWTKVHELKEHNGQVTGIDWAPESNRIVTCGTDRNAYVWTLKGRTWKPTLVILRINRAARCVRWAPNENKFAVGSGSRVISICYFEQENDWWVCKHIKKPIRSTVLSLDWHPNNVLLAAGSCDFKCRIFSAYIKEVEERPAPTPWGSKMPFGELMFESSSSCGWVHGVCFSASGSRVAWVSHDSTVCLADADKKMAVATLASETLPLLALTFITDNSLVAAGHDCFPVLFTYDAAAGMLSFGGRLDVPKQSSQRGLTARERFQNLDKKASSEGGTAAGAGLDSLHKNSVSQISVLSGGKAKCSQFCTTGMDGGMSIWDVKSLESALKDLKIK

SEQ ID NO: 489 - protein, 471 aa, Homo Sapiens [sequence omitted]

SEQ ID NO: 490 - protein, 795 aa, Homo Sapiens
MSKRHRLDLGEDYPSGKKRAGTDGKDRDRDRDREDRSKDRDRERDRGDREREREKEKEKELRASTNAMLISAGLPPLKASHSAHSTHSAHSTHSTHSAHSTHAGHAGHTSLPQCINPFTNLPHTPRYYDILKKRLQLPVWEYKDRFTDILVRHQSFVLVGETGSGKTTQIPQWCVEYMRSLPGPKRGVACTQPRRVAAMSVAQRVADEMDVMLGQEVGYSIRFEDCSSAKTILKYMTDGMLLREAMNDPLLERYGVIILDEAHERTLATDILMGVLKEVVRQRSDLKVIVMSATLDAGKFQIYFDNCPLLTIPGRTHPVEIFYTPEPERDYLEAAIRTVIQIHMCEEEEGDLLLFLTGQEEIDEACKRIKREVDDLGPEVGDIKIIPLYSTLPPQQQQRIFEPPPPKKQNGAIGRKVVVSTNIAETSLTIDGVVFVIDPGFAKQKVYNPRIRVESLLVTAISKASAQQRAGRAGRTRPGKCFRLYTEKAYKTEMQDNTYPEILRSNLGSVVLQLKKLGIDDLVHFDFMDPPAPETLMRALELLNYLAALNDDGDLTELGSMMAEFPLDPQLAKMVIASCDYNCSNEVLSITAMLSVPQCFVRPTEAKKAADEAKMRFAHIDGDHLTLLNVYHAFKQNHESVQWCYDNFINYRSLMSADNVRQQLSRIMDRFNLPRRSTDFTSRDYYINIRKALVTGYFMQVAHLERTGHYLTVKDNQVVQLHPSTVLDHKPEWVLYNEFVLTTKNYIRTCTDIKPEWLVKIAPQYYDMSNFPQCEAKRQLDRIIAKLQSKEYSQY

SEQ ID NO: 491 - protein, 195 aa, Homo Sapiens
MGRARDAILDALENLTAEELKKFKLKLLSVPLREGYGRIPRGALLSMDALDLTDKLVSFYLETYGAELTANVLRDMGLQEMAGQLQAATHQGSGAAPAGIQAPPQSAAKPGLHFIDQHRAALIARVTNVEWLLDALYGKVLTDEQYQAVRAEPTNPSKMRKLFSFTPAWNWTCKDLLLQALRESQSYLVEDLERS

SEQ ID NO: 492 - protein, 173 aa, Homo Sapiens
MGRLDGKVIILTAAAQGIGQAAALAFAREGAKVIATDINESKLQELEKYPGIQTRVLDVTKKKQIDQFANEVERLDVLFNVAGFVHHGTVLDCEEKDWDFSMNLNVRSMYLMIKAFLPKMLAQKSGNIINMSSVASSVKGGSVSFRGLRCSYTHIIKSSAFGNRHSRDYNFKY

SEQ ID NO: 493 - protein, 545 aa, Homo Sapiens
MLLLHRAVVLRLQQACRLKSIPSRICIQACSTNDSFQPQRPSLTFSGDNSSTQGWRVMGTLLGLGAVLAYQDHRCRAAQESTHIYTKEEVSSHTSPETGIWVTLGSEVFDVTEFVDLHPGGPSKLMLAAGGPLEPFWALYAVHNQSHVRELLAQYKIGELNPEDKVAPTVETSDPYADDPVRHPALKVNSQRPFNAEPPPELLTENYITPNPIFFTRNHLPVPNLDPDTYRLHVVGAPGGQSLSLSLDDLHNFPRYEITVTLQCAGNRRSEMTQVKEVKGLEWRTGAISTARWAGARLCDVLAQAGHQLCETEAHVCFEGLDSDPTGTAYGASIPLARAMDPEAEVLLAYEMNGQPLPRDHGFPVRVVVPGVVGARHVKWLGRVSVQPEESYSHWQRRDYKGFSPSVDWETVDFDSAPSIQELPVQSAITEPRDGETVESGEVTIKGYAWSGGGRAVIRVDVSLDGGLTWQVAKLDGEEQRPRKAWAWRLWQLKAPVPAGQKELNIVCKAVDDGYNVQPDTVAPIWNLRGVLSNAWHRVHVYVSP

SEQ ID NO: 494 - protein, 793 aa, Homo Sapiens
MPAGPVQAVPPPPPVPTEPKQPTEEEASSKEDSAPSKPVVGIIYPPPEVRNIVDKTASFVARNGPEFEARIRQNEINNPKFNFLNPNDPYHAYYRHKVSEFKEGKAQEPSAAIPKVMQQQQQTTQQQLPQKVQAQVIQETIVPKEPPPEFEFIADPPSISAFDLDVVKLTAQFVARNGRQFLTQLMQKEQRNYQFDFLRPQHSLFNYFTKLVEQYTKILIPPKGLFSKLKKEAENPREVLDQVCYRVEWAKFQERERKKEEEEKEKERVAYAQIDWHDFVVVETVDFQPNEQGNFPPPTTPEELGARILIQERYEKFGESEEVEMEVESDEEDDKQEKAEEPPSQLDQDTQVQDMDEGSDDEEEGQKVPPPPETPMPPPLPPTPDQVIVRKDYDPKASKPLPPAPAPDEYLVSPITGEKIPASKMQEHMRIGLLDPRWLEQRDRSIREKQSDDEVYAPGLDIESSLKQLAERRTDIFGVEETAIGKKIGEEEIQKPEEKVTWDGHSGSMARTQQAAQANITLQEQIEAIHKAKGLVPEDDTKEKIGPSKPNEIPQQPPPPSSATNIPSSAPPITSVPRPPTMPPPVRTTVVSAVPVMPRPPMASVVRLPPGSVIAPMPPIIHAPRINVVPMPPSAPPIMAPRPPPMIVPTAFVPAPPVAPVPAPAPMPPVHPPPPMEDEPTSKKLKTEDSLMPEEEFLRRNKGPVSIKVQVPNMQDKTEWKLNGQVLVFTLPLTDQVSVIKVKIHEATGMPAGKQKLQYEGIFIKDSNSLAYYNMANGAVIHLALKERGGRKK

SEQ ID NO: 495 - protein, 1357 aa, Homo Sapiens
MEFYESAYFIVLIPSIVITVIFLFFWLFMKETLYDEVLAKQKREQKLIPTKTDKKKAEKKKNKKKEIQNGNLHESDSESVPRDFKLSDALAVEDDQVAPVPLNVVETSSSVRERKKKEKKQKPVLEEQVIKESDASKIPGKKVEPVPVTKQPTPPSEAAASKKKPGQKKSKNGSDDQDKKVETLMVPSKRQEALPLHQETKQESGSGKKKASSKKQKTENVFVDEPLIHATTYIPLMDNADSSPVVDKREVIDLLKPDQVEGIQKSGTKKLKTETDKENAEVKFKDFLLSLKTMMFSEDEALCVVDLLKEKSGVIQDALKKSSKGELTTLIHQLQEKDKLLAAVKEDAAATKDRCKQLTQEMMTEKERSNVVITRMKDRIGTLEKEHNVFQNKIHVSYQETQQMQMKFQQVREQMEAEIAHLKQENGILRDAVSNTTNQLESKQSAELNKLRQDYARLVNELTEKTGKLQQEEVQKKNAEQAATQLKVQLQEAERRWEEVQSYIRKRTAEHEAAQQDLQSKFVAKENEVQSLHSKLTDTLVSKQQLEQRLMQLMESEQKRVNKEESLQMQVQDILEQNEALKAQIQQFHSQIAAQTSASVLAEELHKVIAEKDKQIKQTEDSLASERDRLTSKEEELKDIQNMNFLLKAEVQKLQALANEQAAAAHELEKMQQSVYVKDDKIRLLEEQLQHEISNKMEEFKILNDQNKALKSEVQKLQTLVSEQPNKDVVEQMEKCIQEKDEKLKTVEELLETGLIQVATKEEELNAIRTENSSLTKEVQDLKAKQNDQVSFASLVEELKKVIHEKDGKIKSVEELLEAELLKVANKEKTVQDLKQEIKALKEEIGNVQLEKAQQLSITSKVQELQNLLKGKEEQMNTMKAVLEEKEKDLANTGKWLQDLQEENESLKAHVQEVAQHNLKEASSASQFEELEIVLKEKENELKRLEAMLKERESDLSSKTQLLQDVQDENKLFKSQIEQLKQQNYQQASSFPPHEELLKVISEREKEISGLWNELDSLKDAVEHQRKKNNDLREKNWEAMEALASTEKMLQDKVNKTSKERQQQVEAVELEAKEVLKKLFPKVSVPSNLSYGEWLHGFEKKAKECMAGTSGSEEVKVLEHKLKEADEMHTLLQLECEKYKSVLAETEGILQKLQRSVEQEENKWKVKVDESHKTIKQMQSSFTSSEQELERLRSENKDIENLRREREHLEMELEKAEMERSTYVTEVRELKDLLTELQKKLDDSYSEAVRQNEELNLLKAQLNETLTKLRTEQNERQKVAGDLHKAQQSLELIQSKIVKAAGDTTVIENSDVSPETESSEKETMSVSLNQTVTQLQQLLQAVNQQLTKEKEHYQVLE

SEQ ID NO: 496 - protein, 484 aa, Homo Sapiens
MAAGGDHGSPDSYRSPLASRYASPEMCFVFSDRYKFRTWRQLWLWLAEAEQTLGLPITDEQIQEMKSNLENIDFKMAAEEEKRLRHDVMAHVHTFGHCCPKAAGIIHLGATSCYVGDNTDLIILRNALDLLLPKLARVISRLADFAKERASLPTLGFTHFQPAQLTTVGKRCCLWIQDLCMDLQNLKRVRDDLRFRGVKGTTGTQASFLQLFEGDDHKVEQLDKMVTEKAGFKRAFIITGQTYTRKVDIEVLSVLASLGASVHKICTDIRLLANLKEMEEPFEKQQIGSSAMPYKRNPMRSERCCSLARHLMTLVMDPLQTASVQWFERTLDDSANRRICLAEAFLTADTILNTLQNISEGLVVYPKVIERRIRQELPFMATENIIMAMVKAGGSRQDCHEKIRVLSQQAASVVKQEGGDNDLIERIQVDAYFSPIHSQLDHLLDPSSFTGRASQQVQRFLEEEVYPLLKPYESVMKVKAELCL

SEQ ID NO: 497 - protein, 1222 aa, Homo Sapiens
MLVGQGAGLLGPAVVTAAVVLLLSGVGPAHGSEDIVVGCGGFVKSDVEINYSLIEIKLYTKHGTLKYQTDCAPNNGYFMIPLYDKGDFILKIEPPLGWSFEPTTVELHVDGVSDICTKGGDINFVFTGFSVNGKVLSKGQPLGPAGVQVSLRNTGTEAKIQSTVTQPGGKFAFFKVLPGDYEILATHPTWALKEASTTVRVTNSNANAASPLIVAGYNVSGSVRSDGEPMKGVKFLLFSSLVTKEDVLGCNVSPVPGFQPQDESLVYLCYTVSREDGSFSFYSLPSGGYTVIPFYRGERITFDVAPSRLDFTVEHDSLKIEPVFHVMGFSVTGRVLNGPEGDGVPEAVVTLNNQIKVKTKADGSFRLENITTGTYTIHAQKEHLYFETVTIKIAPNTPQLADIVATGFSVCGRISIIRFPDTVKQMNKYKVVLSSQDKDKSLVTVETDAHGSFCFKAKPGTYKVQVMVPEAETRAGLTLKPQTFPLTVTDRPVMDVAFVQFLASVSGKVSCLDTCGDLLVTLQSLSRQGEKRSLQLSGKVNAMTFTFDNVLPGKYKISIMHEDWCWKNKSLEVEVLEDDVSAVEFRQTGYMLRCSLSHAITLEFYQDGNGRENVGIYNLSKGVNRFCLSKPGVYKVTPRSCHRFEQAFYTYDTSSPSILTLTAIRHHVLGTITTDKMMDVTVTIKSSIDSEPALVLGPLKSVQELRREQQLAEIEARRQEREKNGNEEGEERMTKPPVQEMVDELQGPFSYDFSYWARSGEKITVTPSSKELLFYPPSMEAVVSGESCPGKLIEIHGKAGLFLEGQIHPELEGVEIVISEKGASSPLITVFTDDKGAYSVGPLHSDLEYTVTSQKEGYVLTAVEGTIGDFKAYALAGVSFEIKAEDDQPLPGVLLSLSGGLFRSNLLTQDNGILTFSNLSPGQYYFKPMMKEFRFEPSSQMIEVQEGQNLKITITGYRTAYSCYGTVSSLNGEPEQGVAMEAVGQNDCSIYGEDTVTDEEGKFRLRGLLPGCVYHVQLKAEGNDHIERALPHHRVIEVGNNDIDDVNIIVFRQINQFDLSGNVITSSEYLPTLWVKLYKSENLDNPIQTVSLGQSLFFHFPPLLRDGENYVVLLDSTLPRSQYDYILPQVSFTAVGYHKHITLIFNPTRKLPEQDIAQGSYIALPLTLLVLLAGYNHDKLIPLLLQLTSRLQGVGALGQAASDNSGPEDAKRQAKKQKTRRT

SEQ ID NO: 498 - protein, 105 aa, Homo Sapiens
MVKQIESKTAFQEALDAAGDKLVVVDFSATWCGPCKMIKPFFHSLSEKYSNVIFLEVDVDDCQDVASECEVKCMPTFQFFKKGQKVGEFSGANKEKLEATINELV

SEQ ID NO: 499 - protein, 509 aa, Homo Sapiens
MAAAAGMLLLGLLQAGGSVLGQAMEKVTGGNLLSMLLIACAFTLSLVYLIRLAAGHLVQLPAGVKSPPYIFSPIPFLGHAIAFGKSPIEFLENAYEKYGPVFSFTMVGKTFTYLLGSDAAALLFNSKNEDLNAEDVYSRLTTPVFGKGVAYDVPNPVFLEQKKMLKSGLNIAHFKQHVSIIEKETKEYFESWGESGEKNVFEALSELIILTASHCLHGKEIRSQLNEKVAQLYADLDGGFSHAAWLLPGWLPLPSFRRRDRAHREIKDIFYKAIQKRRQSQEKIDDILQTLLDATYKDGRPLTDDEVAGMLIGLLLAGQHTSSTTSAWMGFFLARDKTLQKKCYLEQKTVCGENLPPLTYDQLKDLNLLDRCIKETLRLRPPIMIMMRMARTPQTVAGYTIPPGHQVCVSPTVNQRLKDSWVERLDFNPDRYLQDNPASGEKFAYVPFGAGRHRCIGENFAYVQIKTIWSTMLRLYEFDLIDGYFPTVNYTTMIHTPENPVIRYKRRSK

SEQ ID NO: 500 - protein, 1104 aa, Homo Sapiens
MERSPGEGPSPSPMDQPSAPSDPTDQPPAAHAKPDPGSGGQPAGPGAAGEALAVLTSFGRRLLVLIPVYLAGAVGLSVGFVLFGLALYLGWRRVRDEKERSLRAARQLLDDEEQLTAKTLYMSHRELPAWVSFPDVEKAEWLNKIVAQVWPFLGQYMEKLLAETVAPAVRGSNPHLQTFTFTRVELGEKPLRIIGVKVHPGQRKEQILLDLNISYVGDVQIDVEVKKYFCKAGVKGMQLHGVLRVILEPLIGDLPFVGAVSMFFIRRPTLDINWTGMTNLLDIPGLSSLSDTMIMDSIAAFLVLPNRLLVPLVPDLQDVAQLRSPLPRGIIRIHLLAARGLSSKDKYVKGLIEGKSDPYALVRLGTQTFCSRVIDEELNPQWGETYEVMVHEVPGQEIEVEVFDKDPDKDDFLGRMKLDVGKVLQASVLDDWFPLQGGQGQVHLRLEWLSLLSDAEKLEQVLQWNWGVSSRPDPPSAAILVVYLDRAQDLPLKKGNKEPNPMVQLSIQDVTQESKAVYSTNCPVWEEAFRFFLQDPQSQELDVQVKDDSRALTLGALTLPLARLLTAPELILDQWFQLSSSGPNSRLYMKLVMRILYLDSSEICFPTVPGCPGAWDVDSENPQRGSSVDAPPRPCHTTPDSQFGTEHVLRIHVLEAQDLIAKDRFLGGLVKGKSDPYVKLKLAGRSFRSHVVREDLNPRWNEVFEVIVTSVPGQELEVEVFDKDLDKDDFLGRCKVRLTTVLNSGFLDEWLTLEDVPSGRLHLRLERLTPRPTAAELEEVLQVNSLIQTQKSAELAAALLSIYMERAEDLPLRKGTKHLSPYATLTVGDSSHKTKTISQTSAPVWDESASFLIRKPHTESLELQVRGEGTGVLGSLSLPLSELLVADQLCLDRWFTLSSGQGQVLLRAQLGILVSQHSGVEAHSHSYSHSSSSLSEEPELSGGPPHITSSAPELRQRLTHVDSPLEAPAGPLGQVKLTLWYYSEERKLVSIVHGCRSLRQNGRDPPDPYVSLLLLPDKNRGTKRRTSQKKRTLSPEFNERFEWELPLDEAQRRKLDVSVKSNSSFMSRERELLGKVQLDLAETDLSQGVARWYDLMDNKDKGSS

SEQ ID NO: 501 - protein, 416 aa, Homo Sapiens [sequence omitted]

SEQ ID NO: 502 - protein, 324 aa, Homo Sapiens
MPELAVQKVVVHPLVLLSVVDHFNRIGKVGNQKRVVGVLLGSWQKKVLDVSNSFAVPFDEDDKDDSVWFLDHDYLENMYGMFKKVNARERIVGWYHTGPKLHKNDIAINELMKRYCPNSVLVIIDVKPKDLGLPTEAYISVEEVHDDGTPTSKTFEHVTSEIGAEEAEEVGVEHLLRDIKDTTVGTLSQRITNQVHGLKGLNSKLLDIRSYLEKVATGKLPINHQIIYQLQDVFNLLPDVSLQEFVKAFYLKTNDQMVVVYLASLIRSVVALHNLINNKIANRDAEKKEGQEKEESKKDRKEDKEKDKDKEKSDVKKEEKKEKK

SEQ ID NO: 503 - protein, 1512 aa, Homo Sapiens
MATLSLTVNSGDPPLGALLAVEHVKDDVSISVEEGKENILHVSENVIFTDVNSILRYLARVATTAGLYGSNLMEHTEIDHWLEFSATKLSSCDSFTSTINELNHCLSLRTYLVGNSLSLADLCVWATLKGNAAWQEQLKQKKAPVHVKRWFGFLEAQQAFQSVGTKWDVSTTKARVAPEKKQDVGKFVELPGAEMGKVTVRFPPEASGYLHIGHAKAALLNQHYQVNFKGKLIMRFDDTNPEKEKEDFEKVILEDVAMLHIKPDQFTYTSDHFETIMKYAEKLIQEGKAYVDDTPAEQMKAEREQRIDSKHRKNPIEKNLQMWEEMKKGSQFGQSCCLRAKIDMSSNNGCMRDPTLYRCKIQPHPRTGNKYNVYPTYDFACPIVDSIEGVTHALRTTEYHDRDEQFYWIIEALGIRKPYIWEYSRLNLNNTVLSKRKLTWFVNEGLVDGWDDPRFPTVRGVLRRGMTVEGLKQFIAAQGSSRSVVNMEWDKIWAFNKKVIDPVAPRYVALLKKEVIPVNVPEAQEEMKEVAKHPKNPEVGLKPVWYSPKVFIEGADAETFSEGEMVTFINWGNLNITKIHKNADGKIISLDAKLNLENKDYKKTTKVTWLAETTHALPIPVICVTYEHLITKPVLGKDEDFKQYVNKNSKHEELMLGDPCLKDLKKGDIIQLQRRGFFICDQPYEPVSPYSCKEAPCVLIYIPDGHTKEMPTSGSKEKTKVEATKNETSAPFKERPTPSLNNNCTTSEDSLVLYNRVAVQGDVVRELKAKKAPKEDVDAAVKQLLSLKAEYKEKTGQEYKPGNPPAEIGQNISSNSSASILESKSLYDEVAAQGEVVRKLKAEKSPKAKINEAVECLLSLKAQYKEKTGKEYIPGQPPLSQSSDSSPTRNSEPAGLETPEAKVLFDKVASQGEVVRKLKTEKAPKDQVDIAVQELLQLKAQYKSLIGVEYKPVSATGAEDKDKKKKEKENKSEKQNKPQKQNDGQRKDPSKNQGGGLSSSGAGEGQGPKKQTRLGLEAKKEENLADWYSQVITKSEMIEYHDISGCYILRPWAYAIWEAIKDFFDAEIKKLGVENCYFPMFVSQSALEKEKTHVADFAPEVAWVTRSGKTELAEPIAIRPTSETVMYPAYAKWVQSHRDLPIKLNQWCNVVRWEFKHPQPFLRTREFLWQEGHSAFATMEEAAEEVLQILDLYAQVYEELLAIPVVKGRKTEKEKFAGGDYTTTIEAFISASGRAIQGGTSHHLGQNFSKMFEIVFEDPKIPGEKQFAYQNSWGLTTRTIGVMTMVHGDNMGLVLPPRVACVQVVIIPCGITNALSEEDKEALIAKCNDYRRRLLSVNIRVRADLRDNYSPGWKFNHWELKGVPIRLEVGPRDMKSCQFVAVRRDTGEKLTVAENEAETKLQAILEDIQVTLFTRASEDLKTHMVVANTMEDFQKILDSGKIVQIPFCGEIDCEDWIKKTTARDQDLEPGAPSMGAKSLCIPFKPLCELQPGAKCVCGKNPAKYYTLFGRSY

SEQ ID NO: 504 - protein, 900 aa, Homo Sapiens
MRLFVSDGVPGCLPVLAAAGRARGRAEVLISTVGPEDCVVPFLTRPKVPVLQLDSGNYLFSTSAICRYFFLLSGWEQDDLTNQWLEWEATELQPALSAALYYLVVQGKKGEDVLGSVRRALTHIDHSLSRQNCPFLAGETESLADIVLWGALYPLLQDPAYLPEELSALHSWFQTLSTQEPCQRAAETVLKQQGVLALRPYLQKQPQPSPAEGRAVTNEPEEEELATLSEEEIAMAVTAWEKGLESLPPLRPQQNPVLPVAGERNVLITSALPYVNNVPHLGNIIGCVLSADVFARYSRLRQWNTLYLCGTDEYGTATETKALEEGLTPQEICDKYHIIHADIYRWFNISFDIFGRTTTPQQTKITQDIFQQLLKRGFVLQDTVEQLRCEHCARFLADRFVEGVCPFCGYEEARGDQCDKCGKLINAVELKKPQCKVCRSCPVVQSSQHLFLDLPKLEKRLEEWLGRTLPGSDWTPNAQFITRSWLRDGLKPRCITRDLKWGTPVPLEGFEDKVFYVWFDATIGYLSITANYTDQWERWWKNPEQVDLYQFMAKDNVPFHSLVFPCSALGAEDNYTLVSHLIATEYLNYEDGKFSKSRGVGVFGDMAQDTGIPADIWRFYLLYIRPEGQDSAFSWTDLLLKNNSELLNNLGNFINRAGMFVSKFFGGYVPEMVLTPDDQRLLAHVTLELQHYHQLLEKVRIRDALRSILTISRHGNQYIQVNEPWKRIKGSEADRQRAGTVTGLAVNIAALLSVMLQPYMPTVSATIQAQLQLPPPACSILLTNFLCTLPAGHQIGTVSPLFQKLENDQIESLRQRFGGGQAKTSPKPAVVETVTTAKPQQIQALMDEVTKQGNIVRELKAQKADKNEVAAEVAKLLDLKKQLAVAEGKPPEAPKGKKKK

SEQ ID NO: 505 - protein, 4391 aa, Homo Sapiens
MGWRAAGALLLALLLHGRLLAVTHGLRAYDGLSLPEDIETVTASQMRWTHSYLSDDEDMLADSISGDDLGSGDLGSGDFQMVYFRALVNFTRSIEYSPQLEDAGSREFREVSEAVVDTLESEYLKIPGDQVVSVVFIKELDGWVFVELDVGSEGNADGAQIQEMLLRVISSGSVASYVTSPQGFQFRRLGTVPQFPRACTEAEFACHSYNECVALEYRCDRRPDCRDMSDELNCEEPVLGISPTFSLLVETTSLPPRPETTIMRQPPVTHAPQPLLPGSVRPLPCGPQEAACRNGHCIPRDYLCDGQEDCEDGSDELDCGPPPPCEPNEFPCGNGHCALKLWRCDGDFDCEDRTDEANCPTKRPEEVCGPTQFRCVSTNMCIPASFHCDEESDCPDRSDEFGCMPPQVVTPPRESIQASRGQTVTFTCVAIGVPTPIINWRLNWGHIPSHPRVTVTSEGGRGTLIIRDVKESDQGAYTCEAMNARGMVFGIPDGVLELVPQRGPCPDGHFYLEHSAACLPCFCFGITSVCQSTRRFRDQIRLRFDQPDDFKGVNVTMPAQPGTPPLSSTQLQIDPSLHEFQLVDLSRRFLVHDSFWALPEQFLGNKVDSYGGSLRYNVRYELARGMLEPVQRPDVVLMGAGYRLLSRGHTPTQPGALNQRQVQFSEEHWVHESGRPVQRAELLQVLQSLEAVLIQTVYNTKMASVGLSDIAMDTTVTHATSHGRAHSVEECRCPIGYSGLSCESCDAHFTRVPGGPYLGTCSGCNCNGHASSCDPVYGHCLNCQHNTEGPQCNKCKAGFFGDAMKATATSCRPCPCPYIDASRRFSDTCFLDTDGQATCDACAPGYTGRRCESCAPGYEGNPIQPGGKCRPVNQEIVRCDERGSMGTSGEACRCKNNVVGRLCNECADGSFHLSTRNPDGCLKCFCMGVSRHCTSSSWSRAQLHGASEEPGHFSLTNAASTHTTNEGIFSPTPGELGFSSFHRLLSGPYFWSLPSRFLGDKVTSYGGELRFTVTQRSQPGSTPLHGQPLVVLQGNNIILEHHVAQEPSPGQPSTFIVPFREQAWQRPDGQPATREHLLMALAGIDTLLIRASYAQQPAESRVSGISMDVAVPEETGQDPALEVEQCSCPPGYRGPSCQDCDTGYTRTPSGLYLGTCERCSCHGHSEACEPETGACQGCQHHTEGPRCEQCQPGYYGDAQRGTPQDCQLCPCYGDPAAGQAAHTCFLDTDGHPTCDACSPGHSGRHCERCAPGYYGNPSQGQPCQRDSQVPGPIGCNCDPQGSVSSQCDAAGQCQCKAQVEGLTCSHCRPHHFHLSASNPDGCLPCFCMGITQQCASSAYTRHLISTHFAPGDFQGFALVNPQRNSRLTGEFTVEPVPEGAQLSFGNFAQLGHESFYWQLPETYQGDKVAAYGGKLRYTLSYTAGPQGSPLSDPDVQITGNNIMLVASQPALQGPERRSYEIMFREEFWRRPDGQPATREHLLMALADLDELLIRATFSSVPLAASISAVSLEVAQPGPSNRPRALEVEECRCPPGYIGLSCQDCAPGYTRTGSGLYLGHCELCECNGHSDLCHPETGACSQCQHNAAGEFCELCAPGYYGDATAGTPEDCQPCACPLTNPENMFSRTCESLGAGGYRCTACEPGYTGQYCEQCGPGYVGNPSVQGGQCLPETNQAPLVVEVHPARSIVPQGGSHSLRCQVSGSPPHYFYWSREDGRPVPSGTQQRHQGSELHFPSVQPSDAGVYICTCRNLHQSNTSRAELLVTEAPSKPITVTVEEQRSQSVRPGADVTFICTAKSKSPAYTLVWTRLHNGKLPTRAMDFNGILTIRNVQLSDAGTYVCTGSNMFAMDQGTATLHVQASGTLSAPVVSIHPPQLTVQPGQLAEFRCSATGSPTPTLEWTGGPGGQLPAKAQIHGGILRLPAVEPTDQAQYLCRAHSSAGQQVARAVLHVHGGGGPRVQVSPERTQVHAGRTVRLYCRAAGVPSATITWRKEGGSLPPQARSERTDIATLLIPAITTADAGFYLCVATSPAGTAQARIQVVVLSASDASPPPVKIESSSPSVTEGQTLDLNCVVAGSAHAQVTWYRRGGSLPPHTQVHGSRLRLPQVSPADSGEYVCRVENGSGPKEASITVSVLHGTHSGPSYTPVPGSTRPIRIEPSSSHVAEGQTLDLNCVVPGQAHAQVTWHKRGGSLPARHQTHGSLLRLHQVTPADSGEYVCHVVGTSGPLEASVLVTIEASVIPGPIPPVRIESSSSTVAEGQTLDLSCVVAGQAHAQVTWYKRGGSLPARHQVRGSRLYIFQASPADAGQYVCRASNGMEASITVTVTGTQGANLAYPAGSTQPIRIEPSSSQVAEGQTLDLNCVVPGQSHAQVTWHKRGGSLPVRHQTHGSLLRLYQASPADSGEYVCRVLGSSVPLEASVLVTIEPAGSVPALGVTPTVRIESSSSQVAEGQTLDLNCLVAGQAHAQVTWHKRGGSLPARHQVHGSRLRLLQVTPADSGEYVCRVVGSSGTQEASVLVTIQQRLSGSHSQGVAYPVRIESSSASLANGHTLDLNCLVASQAPHTITWYKRGGSLPSRHQIVGSRLRIPQVTPADSGEYVCHVSNGAGSRETSLIVTIQGSGSSHVPSVSPPIRIESSSPTVVEGQTLDLNCVVARQPQAIITWYKRGGSLPSRHQTHGSHLRLHQMSVADSGEYVCRANNNIDALEASIVISVSPSAGSPSAPGSSMPIRIESSSSHVAEGETLDLNCVVPGQAHAQVTWHKRGGSLPSHHQTRGSRLRLHHVSPADSGEYVCRVMGSSGPLEASVLVTIEASGSSAVHVPAPGGAPPIRIEPSSSRVAEGQTLDLKCVVPGQAHAQVTWHKRGGNLPARHQVHGPLLRLNQVSPADSGEYSCQVTGSSGTLEASVLVTIEPSSPGPIPAPGLAQPIYIEASSSHVTEGQTLDLNCVVPGQAHAQVTWYKRGGSLPARHQTHGSQLRLHLVSPADSGEYVCRAASGPGPEQEASFTVTVPPSEGSSYRLRSPVISIDPPSSTVQQGQDASFKCLIHDGAAPISLEWKTRNQELEDNVHISPNGSIITIVGTRPSNHGTYRCVASNAYGVAQSVVNLSVHGPPTVSVLPEGPVWVKVGKAVTLECVSAGEPRSSARWTRISSTPAKLEQRTYGLMDSHAVLQISSAKPSDAGTYVCLAQNALGTAQKQVEVIVDTGAMAPGAPQVQAEEAELTVEAGHTATLRCSATGSPAPTIHWSKLRSPLPWQHRLEGDTLIIPRVAQQDSGQYICNATSPAGHAEATIILHVESPPYATTVPEHASVQAGETVQLQCLAHGTPPLTFQWSRVGSSLPGRATARNELLHFERAAPEDSGRYRCRVTNKVGSAEAFAQLLVQGPPGSLPATSIPAGSTPTVQVTPQLETKSIGASVEFHCAVPSDRGTQLRWFKEGGQLPPGHSVQDGVLRIQNLDQSCQGTYICQAHGPWGKAQASAQLVIQALPSVLINIRTSVQTVVVGHAVEFECLALGDPKPQVTWSKVGGHLRPGIVQSGGVVRIAHVELADAGQYRCTATNAAGTTQSHVLLLVQALPQISMPQEVRVPAGSAAVFPCIASGYPTPDISWSKLDGSLPPDSRLENNMLMLPSVRPQDAGTYVCTATNRQGKVKAFAHLQVPERVVPYFTQTPYSFLPLPTIKDAYRKFEIKITFRPDSADGMLLYNGQKRVPGSPTNLANRQPDFISFGLVGGRPEFRFDAGSGMATIRHPTPLALGHFHTVTLLRSLTQGSLIVGDLAPVNGTSQGKFQGLDLNEELYLGGYPDYGAIPKAGLSSGFIGCVRELRIQGEEIVFHDLNLTAHGISHCPTCRDRPCQNGGQCHDSESSSYVCVCPAGFTGSRCEHSQALHCHPEACGPDATCVNRPDGRGYTCRCHLGRSGLRCEEGVTVTTPSLSGAGSYLALPALTNTHHELRLDVEFKPLAPDGVLLFSGGKSGPVEDFVSLAMVGGHLEFRYELGSGLAVLRSAEPLALGRWHRVSAERLNKDGSLRVNGGRPVLRSSPGKSQGLNLHTLLYLGGVEPSVPLSPATNMSAHFRGCVGEVSVNGKRLDLTYSFLGSQGIGQCYDSSPCERQPCQHGATCMPAGEYEFQCLCRDGFKGDLCEHEENPCQLREPCLHGGTCQGTRCLCLPGFSGPRCQQGSGHGIAESDWHLEGSGGNDAPGQYGAYFHDDGFLAFPGHVFSRSLPEVPETIELEVRTSTASGLLLWQGVEVGEAGQGKDFISLGLQDGHLVFRYQLGSGEARLVSEDPINDGEWHRVTALREGRRGSIQVDGEELVSGRSPGPNVAVNAKGSVYIGGAPDVATLTGGRFSSGITGCVKNLVLHSARPGAPPPQPLDLQHRAQAGANTRPCPS

SEQ ID NO: 506 - protein, 464 aa, Homo Sapiens
MASESGKLWGGRFVGAVDPIMEKFNASIAYDRHLWEVDVQGSKAYSRGLEKAGLLTKAEMDQILHGLDKVAEEWAQGTFKLNSNDEDIHTANERRLKELIGATAGKLHTGRSRNDQVVTDLRLWMRQTCSTLSGLLWELIRTMVDRAEAERDVLFPGYTHLQRAQPIRWSHWILSHAVALTRDSERLLEVRKRINVLPLGSGAIAGNPLGVDRELLRAELNFGAITLNSMDATSERDFVAEFLFWASLCMTHLSRMAEDLILYCTKEFSFVQLSDAYSTGSSLMPQKKNPDSLELIRSKAGRVFGRCAGLLMTLKGLPSTYNKDLQEDKEAVFEVSDTMSAVLQVATGVISTLQIHQENMGQALSPDMLATDLAYYLVRKGMPFRQAHEASGKAVFMAETKGVALNQLSLQELQTISPLFSGDVICVWDYGHSVEQYGALGGTARSSVDWQIRQVRALLQAQQA

SEQ ID NO: 507 - protein, 228 aa, Homo Sapiens
MASEELQKDLEEVKVLLEKATRKRVRDALTAEKSKIETEIKNKMQQKSQKKAELLDNEKPAAVVAPITTGYTVKISNYGWDQSDKFVKIYITLTGVHQVPTENVQVHFTERSFDLLVKNLNGKSYSMIVNNLLKPISVEGSSKKVKTDTVLILCRKKVENTRWDYLTQVEKECKEKEKPSYDTETDPSEGLMNVLKKIYEDGDDDMKRTINKAWVESREKQAKGDTEF

SEQ ID NO: 508 - protein, 541 aa, Homo Sapiens
MLSPQRVAAAASRGADDAMESSKPGPVQVVLVQKDQHSFELDEKALASILLQDHIRDLDVVVVSVAGAFRKGKSFILDFMLRYLYSQKESGHSNWLGDPEEPLTGFSWRGGSDPETTGIQIWSEVFTVEKPGGKKVAVVLMDTQGAFDSQSTVKDCATIFALSTMTSSVQIYNLSQNIQEDDLQQLQLFTEYGRLAMDEIFQKPFQTLMFLVRDWSFPYEYSYGLQGGMAFLDKRLQVKEHQHEEIQNVRNHIHSCFSDVTCFLLPHPGLQVATSPDFDGKLKDIAGEFKEQLQALIPYVLNPSKLMEKEINGSKVTCRGLLEYFKAYIKIYQGEDLPHPKSMLQATAEANNLAAAASAKDIYYNNMEEVCGGEKPYLSPDILEEKHCEFKQLALDHFKKTKKMGGKDFSFRYQQELEEEIKELYENFCKHNGSKNVFSTFRTPAVLFTGIVALYIASGLTGFIGLEVVAQLFNCMVGLLLIALLTWGYIRYSGQYRELGGAIDFGAAYVLEQASSHIGNSTQATVRDAVVGRPSMDKKAQ

SEQ ID NO: 509 - protein, 397 aa, Homo Sapiens
MVKETTYYDVLGVKPNATQEELKKAYRKLALKYHPDKNPNEGEKFKQISQAYEVLSDAKKRELYDKGGEQAIKEGGAGGGFGSPMDIFDMFFGGGGRMQRERRGKNVVHQLSVTLEDLYNGATRKLALQKNVICDKCEGRGGKKGAVECCPNCRGTGMQIRIHQIGPGMVQQIQSVCMECQGHGERISPKDRCKSCNGRKIVREKKILEVHIDKGMKDGQKITFHGEGDQEPGLEPGDIIIVLDQKDHAVFTRRGEDLFMCMDIQLVEALCGFQKPISTLDNRTIVITSHPGQIVKHGDIKCVLNEGMPIYRRPYEKGRLIIEFKVNFPENGFLSPDKLSLLEKLLPERKEVEETDEMDQVELVDFDPNQERRRHYNGEAYEDDEHHPRGGVQCQTS

SEQ ID NO: 510 - protein, 589 aa, Homo Sapiens
MPTVSVKRDLLFQALGRTYTDEEFDELCFEFGLELDEITSEKEIISKEQGNVKAAGASDVVLYKIDVPANRYDLLCLEGLVRGLQVFKERIKAPVYKRVMPDGKIQKLIITEETAKIRPFAVAAVLRNIKFTKDRYDSFIELQEKLHQNICRKRALVAIGTHDLDTLSGPFTYTAKRPSDIKFKPLNKTKEYTACELMNIYKTDNHLKHYLHIIENKPLYPVIYDSNGVVLSMPPIINGDHSRITVNTRNIFIECTGTDFTKAKIVLDIIVTMFSEYCENQFTVEAAEVVFPNGKSHTFPELAYRKEMVRADLINKKVGIRETPENLAKLLTRMYLKSEVIGDGNQIEIEIPPTRADIIHACDIVEDAAIAYGYNNIQMTLPKTYTIANQFPLNKLTELLRHDMAAAGFTEALTFALCSQEDIADKLGVDISATKAVHISNPKTAEFQVARTTLLPGLLKTIAANRKMPLPLKLFEISDIVIKDSNTDVGAKNYRHLCAVYYNKNPGFEIIHGLLDRIMQLLDVPPGEDKGGYVIKASEGPAFFPGRCAEIFARGQSVGKLGVLHPDVITKFELTMPCSSLEINVGPFL

SEQ ID NO: 511 - protein, 4646 aa, Homo Sapiens [sequence omitted]

SEQ ID NO: 512 - protein, 201 aa, Homo Sapiens
MALSWVLTVLSLLPLLEAQIPLCANLVPVPITNATLDQITGKWFYIASAFRNEEYNKSVQEIQATFFYFTPNKTEDTIFLREYQTRQDQCIYNTTYLNVQRENGTISRYVGGQEHFAHLLILRDTKTYMLAFDVNDEKNWGLSVYADKPETTKEQLGEFYEALDCLRIPKSDVVYTDWKKDKCEPLEKQHEKERKQEEGES

SEQ ID NO: 513 - protein, 392 aa, Homo Sapiens
MASHKLLVTPPKALLKPLSIPNQLLLGPGPSNLPPRIMAAGGLQMIGSMSKDMYQIMDEIKEGIQYVFQTRNPLTLVISGSGHCALEAALVNVLEPGDSFLVGANGIWGQRAVDIGERIGARVHPMTKDPGGHYTLQEVEEGLAQHKPVLLFLTHGESSTGVLQPLDGFGELCHRYKCLLLVDSVASLGGTPLYMDRQGIDILYSGSQKALNAPPGTSLISFSDKAKKKMYSRKTKPFSFYLDIKWLANFWGCDDQPRMYHHTIPVISLYSLRESLALIAEQGLENSWRQHREAAAYLHGRLQALGLQLFVKDPALRLPTVTTVAVPAGYDWRDIVSYVIDHFDIEIMGGLGPSTGKVLRIGLLGCNATRENVDRVTEALRAALQHCPKKKL

SEQ ID NO: 514 - protein, 439 aa, Homo Sapiens
MRRAALRLCALGKGQLTPGRGLTQGPQNPKKQGIFHIHEVRDKLREIVGASTNWRDHVKAMEERKLLHSFLAKSQDGLPPRRMKDSYIEVLLPLGSEPELREKYLTVQNTVRFGRILEDLDSLGVLICYMHNKIHSAKMSPLSIVTALVDKIDMCKKSLSPEQDIKFSGHVSWVGKTSMEVKMQMFQLHGDEFCPVLDATFVMVARDSENKGPAFVNPLIPESPEEEELFRQGELNKGRRIAFSSTSLLKMAPSAEERTTIHEMFLSTLDPKTISFRSRVLPSNAVWMENSKLKSLEICHPQERNIFNRIFGGFLMRKAYELAWATACSFGGSRPFVVAVDDIMFQKPVEVGSLLFLSSQVCFTQNNYIQVRVHSEVASLQEKQHTTTNVFHFTFMSEKEVPLVFPKTYGESMLYLDGQRHFNSMSGPATLRKDYLVEP

SEQ ID NO: 515 - protein, 547 aa, Homo Sapiens
MSSSPWEPATLRRVFVVGVGMTKFVKPGAENSRDYPDLAEEAGKKALADAQIPYSAVDQACVGYVFGDSTCGQRAIYHSLGMTGIPIINVNNNCATGSTALFMARQLIQGGVAECVLALGFEKMSKGSLGIKFSDRTIPTDKHVDLLINKYGLSAHPVAPQMFGYAGKEHMEKYGTKIEHFAKIGWKNHKHSVNNPYSQFQDEYSLDEVMASKEVFDFLTILQCCPTSDGAAAAILASEAFVQKYGLQSKAVEILAQEMMTDLPSSFEEKSIIKMVGFDMSKEAARKCYEKSGLTPNDIDVIELHDCFSTNELLTYEALGLCPEGQGATLVDRGDNTYGGKWVINPSGGLISKGHPLGATGLAQCAELCWQLRGEAGKRQVPGAKVALQHNLGIGGAVVVTLYKMGFPEAASSFRTHQIEAVPTSSASDGFKANLVFKEIEKKLEEEGEQFVKKIGGIFAFKVKDGPGGKEATWVVDVKNGKGSVLPNSDKKADCTITMADSDFLALMTGKMNPQSAFFQGKLKITGNMGLAMKLQNLQLQPGNAKL

SEQ ID NO: 516 - protein, 446 aa, Homo Sapiens
MGLEALVPLAVIVAIFLLLVDLMHRRQRWAARYPPGPLPLPGLGNLLHVDFQNTPYCFDQLRRRFGDVFSLQLAWTPVVVLNGLAAVREALVTHGEDTADRPPVPITQILGFGPRSQGRPFRPNGLLDKAVSNVIASLTCGRRFEYDDPRFLRLLDLAQEGLKEESGFLREVLNAVPVLLHIPALAGKVLRFQKAFLTQLDELLTEHRMTWDPAQPPRDLTEAFLAEMEKAKGNPESSFNDENLCIVVADLFSAGMVTTSTTLAWGLLLMILHPDVQRRVQQEIDDVIGQVRRPEMGDQAHMPYTTAVIHEVQRFGDIVPLGVTHMTSRDIEVQGFRIPKGTTLITNLSSVLKDEAVWEKPFRFHPEHFLDAQGHFVKPEAFLPFSAGRRACLGEPLARMELFLFFTSLLQHFSFSVPTGQPRPSHHGVFAFLVTPSPYELCAVPR

SEQ ID NO: 517 - protein, 340 aa, Homo Sapiens
MALRLLRRAARGAAAAALLRLKASLAADIPRLGYSSSSHHKYIPRRAVLYVPGNDEKKIKKIPSLNVDCAVLDCEDGVAANKKNEARLRIVKTLEDIDLGPTEKCVRVNSVSSGLAEEDLETLLQSRVLPSSLMLPKVESPEEIQWFADKFSFHLKGRKLEQPMNLIPFVETAMGLLNFKAVCEETLKVGPQVGLFLDAVVFGGEDFRASIGATSSKETLDILYARQKIVVIAKAFGLQAIDLVYIDFRDGAGLLRQSREGAAMGFTGKQVIHPNQIAVVQEQFSPSPEKIKWAEELIAAFKEHQQLGKGAFTFQGSMIDMPLLKQAQNTVTLATSIKEK

SEQ ID NO: 518 - protein, 244 aa, Homo Sapiens
MEVTGVSAPTVTVFISSSLNTFRSEKRYSRSLTIAEFKCKLELLVGSPASCMELELYGVDDKFYSKLDQEDALLGSYPVDDGCRIHVIDHSGARLGEYEDVSRVEKYTISQEAYDQRQDTVRSFLKRSKLGRYNEEERAQQEAEAAQRLAEEKAQASSIPVGSRCEVRAAGQSPRRGTVMYVGLTDFKPGYWIGVRYDEPLGKNDGSVNGKRYFECQAKYGAFVKPAVVTVGDFPEEDYGLDEI

SEQ ID NO: 519 - protein, 255 aa, Homo Sapiens
MVKLTAELIEQAAQYTNAVRDRELDLRGYKIPVIENLGATLDQFDAIDFSDNEIRKLDGFPLLRRLKTLLVNNNRICRIGEGLDQALPCLTELILTNNSLVELGDLDPLASLKSLTYLSILRNPVTNKKHYRLYVIYKVPQVRVLDFQKVKLKERQEAEKMFKGKRGAQLAKDIARRSKTFNPGAGLPTDKKKGGPSPGDVEAIKNAIANASTLAEVERLKGLLQSGQIPGRERRSGPTDDGEEEMEEDTVTNGS

SEQ ID NO: 520 - protein, 1094 aa, Homo Sapiens
MNVNQSVPPVPPFGQPQPIYPGYHQSSYGGQSGSTAPAIPYGAYNGPVPGYQQTPPQGMSRAPPSSGAPPASTAQAPCGQAAYGQFGQGDVQNGPSSTVQMQRLPGSQPFGSPLAPVGNQPPVLQPYGPPPTSAQVATQLSGMQISGAVAPAPPSSGLGFGPPTSLASASGSFPNSGLYGSYPQGQAPPLSQAQGHPGIQTPQRSAPSQASSFTPPASGGPRLPSMTGPLLPGQSFGGPSVSQPNHVSSPPQALPPGTQMTGPLGPLPPMHSPQQPGYQPQQNGSFGPARGPQSNYGGPYPAAPTFGSQPGPPQPLPPKRLDPDAIPSPIQVIEDDRNNRGTEPFVTGVRGQVPPLVTTNFLVKDQGNASPRYIRCTSYNIPCTSDMAKQAQVPLAAVIKPLARLPPEEASPYVVDHGESGPLRCNRCKAYMCPFMQFIEGGRRFQCCFCSCINDVPPQYFQHLDHTGKRVDAYDRPELSLGSYEFLATVDYCKNNKFPSPPAFIFMIDVSYNAIRTGLVRLLCEELKSLLDFLPREGGAEESAIRVGFVTYNKVLHFYNVKSSLAQPQMMVVSDVADMFVPLLDGFLVNVNESRAVITSLLDQIPEMFADTRETETVFVPVIQAGMEALKAAECAGKLFLFHTSLPIAEAPGKLKNRDDRKLINTDKEKTLFQPQTGAYQTLAKECVAQGCCVDLFLFPNQYVDVATLSVVPQLTGGSVYKYASFQVENDQERFLSDLRRDVQKVVGFDAVMRVRTSTGIRAVDFFGAFYMSNTTDVELAGLDGDKTVTVEFKHDDRLNEESGALLQCALLYTSCAGQRRLRIHNLALNCCTQLADLYRNCETDTLINYMAKFAYRGVLNSPVKAVRDTLITQCAQILACYRKNCASPSSAGQLILPECMKLLPVYLNCVLKSDVLQPGAEVTTDDRAYVRQLVTSMDVTETNVFFYPRLLPLTKSPVESTTEPPAVRASEERLSNGDIYLLENGLNLFLWVGASVQQGVVQSLFSVSSFSQITSGLSVLPVLDNPLSKKVRGLIDSLRAQRSRYMKLTVVKQEDKMEMLFKHFLVEDKSLSGGASYVDFLCHMHKEIRQLLS

SEQ ID NO: 521 - protein, 183 aa, Homo Sapiens
MASNKTTLQKMGKKQNGKSKKVEEAEPEEFVVEKVLDRRVVNGKVEYFLKWKGFTDADNTWEPEENLDCPELIEAFLNSQKAGKEKDGTKRKSLSDSESDDSKSKKKRDAADKPRGFARGLDPERIIGATDSSGELMFLMKWKDSDEADLVLAKEANMKCPQIVIAFYEERLTWHSCPEDEAQ

SEQ ID NO: 522 - protein, 504 aa, Homo Sapiens
MPTVEELYRNYGILADATEQVGQHKDAYQVILDGVKGGTKEKRLAAQFIPKFFKHFPELADSAINAQLDLCEDEDVSIRRQAIKELPQFATGENLPRVADILTQLLQTDDSAEFNLVNNALLSIFKMDAKGTLGGLFSQILQGEDIVRERAIKFLSTKLKTLPDEVLTKEVEELILTESKKVLEDVTGEEFVLFMKILSGLKSLQTVSGRQQLVELVAEQADLEQTFNPSDPDCVDRLLQCTRQAVPLFSKNVHSTRFVTYFCEQVLPNLGTLTTPVEGLDIQLEVLKLLAEMSSFCGDMEKLETNLRKLFDKLLEYMPLPPEEAENGENAGNEEPKLQFSYVECLLYSFHQLGRKLPDFLTAKLNAEKLKDFKIRLQYFARGLQVYIRQLRLALQGKTGEALKTEENKIKVVALKITNNINVLIKDLFHIPPSYKSTVTLSWKPVQKVEIGQKRASEDTTSGSPPKKSSAGPKRDARQIYNPPSGKYSSNLGNFNYERSLQGK

SEQ ID NO: 523 - protein, 926 aa, Homo Sapiens
MADDDVLFEDVYELCEVIGKGPFSVVRRCINRETGQQFAVKIVDVAKFTSSPGLSTEDLKREASICHMLKHPHIVELLETYSSDGMLYMVFEFMDGADLCFEIVKRADAGFVYSEAVASHYMRQILEALRYCHDNNIIHRDVKPHCVLLASKENSAPVKLGGFGVAIQLGESGLVAGGRVGTPHFMAPEVVKREPYGKPVDVWGCGVILFILLSGCLPFYGTKERLFEGIIKGKYKMNPRQWSHISESAKDLVRRMLMLDPAERITVYEALNHPWLKERDRYAYKIHLPETVEQLRKFNARRKLKGAVLAAVSSHKFNSFYGDPPEELPDFSEDPTSSGLLAAERAVSQVLDSLEEIHALTDCSEKDLDFLHSVFQDQHLHTLLDLYDKINTKSSPQIRNPPSDAVQRAKEVLEEISCYPENNDAKELKRILTQPHFMALLQTHDVVAHEVYSDEALRVTPPPTSPYLNGDSPESANGDMDMENVTRVRLVQFQKNTDEPMGITLKMNELNHCIVARIMHGGMIHRQGTLHVGDEIREINGISVANQTVEQLQKMLREMRGSITFKIVPSYRTQSSSCERDSPSTSRQSPANGHSSTNNSVSDLPSTTQPKGRQIYVRAQFEYDPAKDDLIPCKEAGIRFRVGDIIQIISKDDHNWWQGKLENSKNGTAGLIPSPELQEWRVACIAMEKTKQEQQASCTWFGKKKKQYKDKYLAKHNAVFDQLDLVTYEEVVKLPAFKRKTLVLLGAHGVGRRHIKNTLITKHPDRFAYPIPHTTRPPKKDEENGKNYYFVSHDQMMQDISNNEYLEYGSHEDAMYGTKLETIRKIHEQGLIAILDVEPQALKVLRTAEFAPFVVFIAAPTITPGLNEDESLQRLQKESDILQRTYAHYFDLTIINNEIDETIRHLEEAVELVCTAPQWVPVSWVY

SEQ ID NO: 524 - protein, 1019 aa, Homo Sapiens [sequence omitted]

SEQ ID NO: 525 - protein, 606 aa, Homo Sapiens
MPYEIKKVFASLPQVERGVSKIIGGDPKGNNFLYTNGKCVILRNIDNPALADIYTEHAHQVVVAKYAPSGFYIASGDVSGKLRIWDTTQKEHLLKYEYQPFAGKIKDIAWTEDSKRIAVVGEGREKFGAVFLWDSGSSVGEITGHNKVINSVDIKQSRPYRLATGSDDNCAAFFEGPPFKFKFTIGDHSRFVNCVRFSPDGNRFATASADGQIYIYDGKTGEKVCALGGSKAHDGGIYAISWSPDSTHLLSASGDKTSKIWDVSVNSVVSTFPMGSTVLDQQLGCLWQKDHLLSVSLSGYINYLDRNNPSKPLHVIKGHSKSIQCLTVHKNGGKSYIYSGSHDGHINYWDSETGENDSFAGKGHTNQVSRMTVDESGQLISCSMDDTVRYTSLMLRDYSGQGVVKLDVQPKCVAVGPGGYAVVVCIGQIVLLKDQRKCFSIDNPGYEPEVVAVHPGGDTVAIGGVDGNVRLYSILGTTLKDEGKLLEAKGPVTDVAYSHDGAFLAVCDASKVVTVFSVADGYSENNVFYGHHAKIVCLAWSPDNEHFASGGMDMMVYVWTLSDPETRVKIQDAHRLHHVSSLAWLDEHTLVTTSHDASVKEWTITY

SEQ ID NO: 526 - protein, 230 aa, Homo Sapiens
MEGQRWLPLEANPEVTNQFLKQLGLHPNWQFVDVYGMDPELLSMVPRPVCAVLLLFPITEKYEVFRTEEEEKIKSQGQDVTSSVYFMKQTISNACGTIGLIHAIANNKDKMHFESGSTLKKFLEESVSMSPEERARYLENYDAIRVTHETSAHEGQTEAPSIDEKVDLHFIALVHVDGHLYELDGRKPFPINHGETSDETLLEDAIEVCKKFMERDPDELRFNAIALSAA

SEQ ID NO: 527 - protein, 420 aa, Homo Sapiens
MEVPPRLSHVPPPLFPSAPATLASRSLSHWRPRPPRQLAPLLPSLAPSSARQGARRAQRHVTAQQPSRLAGGAAIKGGRRRRPDLFRRHFKSSSIQRSAAAAAATRTARQHPPADSSVTMEDMNEYSNIEEFAEGSKINASKNQQDDGKMFIGGLSWDTSKKDLTEYLSRFGEVVDCTIKTDPVTGRSRGFGFVLFKDAASVDKVLELKEHKLDGKLIDPKRAKALKGKEPPKKVFVGGLSPDTSEEQIKEYFGAFGEIENIELPMDTKTNERRGFCFITYTDEEPVKKLLESRYHQIGSGKCEIKVAQPKEVYRQQQQQQKGGRGAAAGGRGGTRGRGRGQGQNWNQGFNNYYDQGYGNYNSAYGGDQNYSGYGGYDYTGYNYGNYGYGQGYADYSGQQSTYGKASRGGGNHQNNYQPY

SEQ ID NO: 528 - protein, 295 aa, Homo Sapiens
MDNSGKEAEAMALLAEAERKVKNSQSFFSGLFGGSSKIEEACEIYARAANMFKMAKNWSAAGNAFCQAAQLHLQLQSKHDAATCFVDAGNAFKKADPQEAINCLMRAIEIYTDMGRFTIAAKHHISIAEIYETELVDIEKAIAHYEQSADYYKGEESNSSANKCLLKVAGYAALLEQYQKAIDIYEQVGTNAMDSPLLKYSAKDYFFKAALCHFCIDMLNAKLAVQKYEELFPAFSDSRECKLMKKLLEAHEEQNVDSYTESVKEYDSISRLDQWLTTMLLRIKKTIQGDEEDLR

SEQ ID NO: 529 - protein, 437 aa, Homo Sapiens
MADDPSAADRNVEIWKIKKLIKSLEAARGNGTSMISLIIPPKDQISRVAKMLADEFGTASNIKSRVNRLSVLGAITSVQQRLKLYNKVPPNGLVVYCGTIVTEEGKEKKVNIDFEPFKPINTSLYLCDNKFHTEALTALLSDDSKFGFIVIDGSGALFGTLQGNTREVLHKFTVDLPKKHGRGGQSALRFARLRMEKRHNYVRKVAETAVQLFISGDKVNVAGLVLAGSADFKTELSQSDMFDQRLQSKVLKLVDISYGGENGFNQAIELSTEVLSNVKFIQEKKLIGRYFDEISQDTGKYCFGVEDTLKALEMGAVEILIVYENLDIMRYVLHCQGTEEEKILYLTPEQEKDKSHFTDKETGQEHELIESMPLLEWFANNYKKFGATLEIVTDKSQEGSQFVKGFGGIGGILRYRVDFQGMEYQGGDDEFFDLDDY

SEQ ID NO: 530 - protein, 447 aa, Homo Sapiens
MPVLYDRLLKLKEMFNSKFGSIPKFYVRAPGRVNIIGEHIDYCGYSVLPMAVEQDVLIAVEPVKTYALQLANTNPLYPDFSTSANNIQIDKTKPLWHNYFLCGLKGIQEHFGLSNLTGMNCLVDGNIPPSSGLSSSSALVCCAGLVTLTVLGRNLSKVELAEICAKSERYIGTEGGGMDQSISFLAEEGTAKLIEFSPLRATDVKLPSGAVFVIANSCVEMNKAATSHFNIRVMECRLAAKLLAKYKSLQWDKVLRLEEVQAKLGISLEEMLLVTEDALHPEPYNPEEICRCLGISLEELRTQILSPNTQDVLIFKLYQRAKHVYSEAARVLQFKKICEEAPENMVQLLGELMNQSHMSCRDMYECSCPELDQLVDICRKFGAQGSRLTGAGWGGCTVSMVPADKLPSFLANVHKAYYQRSDGSLAPEKQSLFATKPGGGALVLLEA

SEQ ID NO: 531 - protein, 223 aa, Homo Sapiens
MPVIPAFWEAEAARSPEEIRKVVQSLEQTAREILTLLQGVHQGAGFQDIPKRCLKAREHFGTVKTHLTSLKTKFPAEQYYRFHEHWRFVLQRLVFLAAFVVYLETETLVTREAVTEILGIEPDREKGFHLDVEDYLSGVLILASELSRLSVNSVTAGDYSRPLHISTFINELDSGFRLLNLKNDSLRKRYDGLKYDVKKVEEVVYDLSIRGFNKETAAACVEK

SEQ ID NO: 532 - protein, 426 aa, Homo Sapiens
MASGHSLLLENAQQVVLVCARGERFLARDALRSLAVLEGASLVVGKDGFIKAIGPADVIQRQFSGETFEEIIDCSGKCILPGLVDAHTHPVWAGERVHEFAMKLAGATYMEIHQAGGGIHFTVERTRQATEEELFRSLQQRLQCMMRAGTTLVECKSGYGLDLETELKMLRVIERARRELDIGISATYCGAHSVPKGKTATEAADDIINNHLPKLKELGRNGEIHVDNIDVFCEKGVFDLDSTRRILQRGKDIGLQINFHGDELHPMKAAELGAELGAQAISHLEEVSDEGIVAMATARCSAILLPTTAYMLRLKQPRARKMLDEGVIVALGSDFNPNAYCFSMPMVMHLACVNMRMSMPEALAAATINAAYALGKSHTHGSLEVGKQGDLIIINSSRWEHLIYQFGGHHELIEYVIAKGKLIYKT

SEQ ID NO: 533 - protein, 255 aa, Homo Sapiens
MDDREDLVYQAKLAEQAERYDEMVESMKKVAGMDVELTVEERNLLSVAYKNVIGARRASWRIISSIEQKEENKGGEDKLKMIREYRQMVETELKLICCDILDVLDKHLIPAANTGESKVFYYKMKGDYHRYLAEFATGNDRKEAAENSLVAYKAASDIAMTELPPTHPIRLGLALNFSVFYYEILNSPDRACRLAKAAFDDAIAELDTLSEESYKDSTLIMQLLRDNLTLWTSDMQGDGEEQNKEALQDVEDENQ

SEQ ID NO: 534 - protein, 173 aa, Homo Sapiens
MALRVVRSVRALLCTLRAVPSPAAPCPPRPWQLGVGAVRTLRTGPALLSVRKFTEKHEWVTTENGIGTVGISNFAQEALGDVVYCSLPEVGTKLNKQDEFGALESVKAASELYSPLSGEVTEINEALAENPGLVNKSCYEDGWLIKMTLSNPSELDELMSEEAYEKYIKSIEE

SEQ ID NO: 535 - protein, 302 aa, Homo Sapiens
MEPGPDGPAASGPAAIREGWFRETCSLWPGQALSLQVEQLLHHRRSRYQDILVFRSKTYGNVLVLDGVIQCTERDEFSYQEMIANLPLCSHPNPRKVLIIGGGDGGVLREVVKHPSVESVVQCEIDEDVIQVSKKFLPGMAIGYSSSKLTLHVGDGFEFMKQNQDAFDVIITDSSDPMGPAESLFKESYYQLMKTALKEDGVLCCQGECQWLHLDLIKEMRQFCQSLFPVVAYAYCTIPTYPSGQIGFMLCSKNPSTNFQEPVQPLTQQQVAQMQLKYYNSDVHRAAFVLPEFARKALNDVS

SEQ ID NO: 536 - protein, 184 aa, Homo Sapiens
MKPDETPMFDPSLLKEVDWSQNTATFSPAISPTHPGEGLVLRPLCTADLNRGFFKVLGQLTETGVVSPEQFMKSFEHMKKSGDYYVTVVEDVTLGQIVATATLIIEHKFIHSCAKRGRVEDVVVSDECRGKQLGKLLLSTLTLLSKKLNCYKITLECLPQNVGFYKKFGYTVSEENYMCRRFLK

SEQ ID NO: 537 - protein, 2297 aa, Homo Sapiens
MADLSLADALTEPSPDIEGEIKRDFIATLEAEAFDDVVGETVGKTDYIPLLDVDEKTGNSESKKKPCSETSQIEDLPLPPHPASLSFHLPLDTPSSKPTLLANGGHGVEGSDTTGSPTEFLEEKMAYQEYPNSQNWPEDTNFCFQPEQVVDPIQTDPFKMYHDDDLADLVFPSSATADTSIFAGQNDPLKDSYGMSPCNTAVVPQGWSVEALNSPHSESFVSPEAVAEPPQPTAVPLELAKEIEMASEERPPAQALEIMMGLKTTDMAPSKETEMALAKDMALATKTEVALAKDMESPTKLDVTLAKDMQPSMESDMALVKDMELPTEKEVALVKDVRWPTETDVSSAKNVVLPTETEVAPAKDVTLLKETERASPIKMDLAPSKDMGPPKENKKETERASPIKMDLAPSKDMGPPKENKIVPAKDLVLLSEIEVAQANDIISSTEISSAEKVALSSETEVALARDMTLPPETNVILTKDKALPLEAEVAPVKDMAQLPETEIAPAKDVAPSTVKEVGLLKDMSPLSETEMALGKDVTPPPETEVVLIKNVCLPPEMEVALTEDQVPALKTEAPLAKDGVLTLANNVTPAKDVPPLSETEATPVPIKDMEIAQTQKGISEDSHLESLQDVGQSAAPTFMISPETVTGTGKKCSLPAEEDSVLEKLGERKPCNSQPSELSSETSANFMYCGTPPTQAKQVCRPSDRRSTRPKPARVPPELLGGSPPWKTLDHRLGHCSLSESGWVSGSSSCGGPGNQRKSIHVDSLEPQRDLGREAWDIESTPIMMKKKKKKPKQKRYSQPRAGGPSDDDNADKPKGHPFAADTQKSGVLPSQPTTMGTEYGLVSGENLKRECLVNSSAARLVAENFVSESLRIPLYPSEEAPKTAISSQSKLRVEEESKSNKSVLQNQDKKLLKQHEYKPQPAPHLKTPVDKSQSVGPLNLKGPLAEVSAYNVETPLDIRLKEGCSPFLDQEVMGVVSKPTAAKEIPNLVPTLIASNPLECNLKEGNNESKMTKLQNVKLKEFPEGAEEDKELKKEAFPNERQEISIFTSEQLQGQVLVQVPGVENEPFKRMAGDGKSRKGRGSSGKMRTDSGKVKAKSELPFLLDSQKDGRAVLIPSEPVSKTEGMTTQDKSEELGLNSSKQPGTKADLTEAVVMGEPKEMTQPKVAGTMQALIPLESGSGMTQTSGVSTETGDVVKDMGVNNQSKEGRCPWKDHEAAPWISEKPKKRGNEGKSKKFKNNYSTQPARMERKEEILNPPFEGKDGDTGSIPHKSKEIGFTFPKMHDSSFSHTPDTPTVEAVDRKGGNFQVNFVELGTLGENKISTVKASTVTEPPAKVTDVSCQEQIQGAGFVPSVVSEENKTDAANRYTAVADKPSKRSNDGKSKKVKNSSPEKHILENKIDATKIHVPMETTGDQGIEGMAYMDENRNITFTCPRTPSELINKSSPLEVLESAACEKLPTPTPQVVKEGDSFPDTLAKNGQEIAPAQISKSLMVDNYTKDGVPGQERPKGPSAVVPSTSTGGVALPITTAIETVNIHGDHSLKNKAELADSMKNEAGIDEGHVIGESESVHSGASKHSVEKVTELAKGHLLPGVPVEDQSLPGEARALEGYADRGNFPAHPVNEEKETKEGSVAVQIPDLLEDKAQKLSFCEDQNAQDRNSKGSDSLNKKVDLTLLSPKSENDKLKEISLACKITELESVSLPTPEIQSDFLHSKVEAPPSEVADTLVIMTASKGVRLPEPKDKILETPQKMTEKSESKTPGEGKKEDKSRMAEPMKGYMRPTKSRGLTPLLPKSTIQEQERHKQLKSAGIARPEEGRPVVSGTGNDITTPPNKELPPSPEKKTKPLATTQPAKTSTSKAKTQPTSLPKQPAPTTIGGLNKKPMSLASGLVPAAPPKRPAVASARPSILPSKDVKPKPIADAKAPEKRASPSKPASAPASRSGSKSTQTVAKTTTAAAVASTGPSSRSPSTLLPKKPTAIKTEGKPAEVKKMTAKSVPADLSRPKSTSTSSMKKTTTLSGTAPAAGVVPSRVKATPMPSRPSTTPFIDKKPTSAKPSSTTPRLSRLATNTSAPDLKNVRSKVGSTENIKHQPGGGRAKVEKKTEAAATTRKPESNAVTKTAGPIASAQKQPAGKVQIVSKKVSYSHIQSKCGSKDNIKHVPGGGNVQIQNKKVDISKVSSKCGSKANIKHKPGGGDVKIESQKLNFKEKAQAKVGSLDNVGHLPAGGAVKTEGGGSEAPLCPGPPAGEEPAISEAAPEAGAPTSASGLNGHPTLSGGGDQREAQTLDSQIQETSI

SEQ ID NO: 538 - protein, 481 aa, Homo Sapiens
MGALARALPSILLALLLTSTPEALGANPGLVARITDKGLQYAAQEGLLALQSELLRITLPDFTGDLRIPHVGRGRYEFHSLNIHSCELLHSALRPVPGQGLSLSISDSSIRVQGRWKVRKSFFKLQGSFDVSVKGISISVNLLLGSESSGRPTVTASSCSSDIADVEVDMSGDLGWLLNLFHNQIESKFQKVLESRICEMIQKSVSSDLQPYLQTLPVTTEIDSFADIDYSLVEAPRATAQMLEVMFKGEIFHRNHRSPVTLLAAVMSLPEEHNKMVYFAISDYVFNTASLVYHEEGYLNFSITDDMIPPDSNIRLTTKSFRPFVPRLARLYPNMNLELQGSVPSAPLLNFSPGNLSVDPYMEIDAFVLLPSSSKEPVFRLSVATNVSATLTFNTSKITGFLKPGKVKVELKESKVGLFNAELLEALLNYYILNTFYPKFNDKLAEGFPLPLLKRVQLYDLGLQIHKDFLFLGANVQYMRV

SEQ ID NO: 539 - protein, 328 aa, Homo Sapiens
MMSGEPLHVKTPIRDSMALSKMAGTSVYLKMDSAQPSGSFKIRGIGHFCKRWAKQGCAHFVCSSAGNAGMAAAYAARQLGVPATIVVPSTTPALTIERLKNEGATVKVVGELLDEAFELAKALAKNNPGWVYIPPFDDPLIWEGHASIVKELKETLWEKPGAIALSVGGGGLLCGVVQGLQEVGWGDVPVIAMETFGAHSFHAATTAGKLVSLPKITSVAKALGVKTVGAQALKLFQEHPIFSEVISDQEAVAAIEKFVDDEKILVEPACGAALAAVYSHVIQKLQLEGNLRTPLPSLVVIVCGGSNISLAQLRALKEQLGMTNRLPK

SEQ ID NO: 540 - protein, 1217 aa, Homo Sapiens
MFLYNLTLQRATGISFAIHGNFSGTKQQEIVVSRGKILELLRPDPNTGKVHTLLTVEVFGVIRSLMAFRLTGGTKDYIVVGSDSGRIVILEYQPSKNMFEKIHQETFGKSGCRRIVPGQFLAVDPKGRAVMISAIEKQKLVYILNRDAAARLTISSPLEAHKANTLVYHVVGVDVGFENPMFACLEMDYEEADNDPTGEAAANTQQTLTFYELDLGLNHVVRKYSEPLEEHGNFLITVPGGSDGPSGVLICSENYITYKNFGDQPDIRCPIPRRRNDLDDPERGMIFVCSATHKTKSMFFFLAQTEQGDIFKITLETDEDMVTEIRLKYFDTVPVAAAMCVLKTGFLFVASEFGNHYLYQIAHLGDDDEEPEFSSAMPLEEGDTFFFQPRPLKNLVLVDELDSLSPILFCQIADLANEDTPQLYVACGRGPRSSLRVLRHGLEVSEMAVSELPGNPNAVWTVRRHIEDEFDAYIIVSFVNATLVLSIGETVEEVTDSGFLGTTPTLSCSLLGDDALVQVYPDGIRHIRADKRVNEWKTPGKKTIVKCAVNQRQVVIALTGGELVYFEMDPSGQLNEYTERKEMSADVVCMSLANVPPGEQRSRFLAVGLVDNTVRIISLDPSDCLQPLSMQALPAQPESLCIVEMGGTEKQDELGERGSIGFLYLNIGLQNGVLLRTVLDPVTGDLSDTRTRYLGSRPVKLFRVRMQGQEAVLAMSSRSWLSYSYQSRFHLTPLSYETLEFASGFASEQCPEGIVAISTNTLRILALEKLGAVFNQVAFPLQYTPRKFVIHPESNNLIIIETDHNAYTEATKAQRKQQMAEEMVEAAGEDERELAAEMAAAFLNENLPESIFGAPKAGNGQWASVIRVMNPIQGNTLDLVQLEQNEAAFSVAVCRFSNTGEDWYVLVGVAKDLILNPRSVAGGFVYTYKLVNNGEKLEFLHKTPVEEVPAAIAPFQGRVLIGVGKLLRVYDLGKKKLLRKCENKHIANYISGIQTIGHRVIVSDVQESFIWVRYKRNENQLIIFADDTYPRWVTTASLLDYDTVAGADKFGNICVVRLPPNTNDEVDEDPTGNKALWDRGLLNGASQKAEVIMNYHVGETVLSLQKTTLIPGGSESLVYTTLSGGIGILVPFTSHEDHDFFQHVEMHLRSEHPPLCGRDHLSFRSYYFPVKNVIDGDLCEQFNSMEPNKQKNVSEELDRTPPEVSKKLEDIRTRYAF

SEQ ID NO: 541 - protein, 2871 aa, Homo Sapiens
MSCNGGSHPRINTLGRMIRAESGPDLRYEVTSGGGGTSRMYYSRRGVITDQNSDGYCQTGTMSRHQNQNTIQELLQNCSDCLMRAELIVQPELKYGDGIQLTRSRELDECFAQANDQMEILDSLIREMRQMGQPCDAYQKRLLQLQEQMRALYKAISVPRVRRASSKGGGGYTCQSGSGWDEFTKHVTSECLGWMRQQRAEMDMVAWGVDLASVEQHINSHRGIHNSIGDYRWQLDKIKADLREKSAIYQLEEEYENLLKASFERMDHLRQLQNIIQATSREIMWINDCEEEELLYDWSDKNTNIAQKQEAFSIRMSQLEVKEKELNKLKQESDQLVLNQHPASDKIEAYMDTLQTQWSWILQITKCIDVHLKENAAYFQFFEEAQSTEAYLKGLQDSIRKKYPCDKNMPLQHLLEQIKELEKEREKILEYKRQVQNLVNKSKKIVQLKPRNPDYRSNKPIILRALCDYKQDQKIVHKGDECILKDNNERSKWYVTGPGGVDMLVPSVGLIIPPPNPLAVDLSCKIEQYYEAILALWNQLYINMKSLVSWHYCMIDIEKIRAMTIAKLKTMRQEDYMKTIADLELHYQEFIRNSQGSEMFGDDDKRKIQSQFTDAQKHYQTLVIQLPGYPQHQTVTTTEITHHGTCQDVNHNKVIETNRENDKQETWMLMELQKIRRQIEHCEGRMTLKNLPLADQGSSHHITVKINELKSVQNDSQAIAEVLNQLKDMLANFRGSEKYCYLQNEVFGLFQKLENINGVTDGYLNSLCTVRALLQAILQTEDMLKVYEARLTEEETVCLDLDKVEAYRCGLKKIKNDLNLKKSLLATMKTELQKAQQIHSQTSQQYPLYDLDLGKFGEKVTQLTDRWQRIDKQIDFRLWDLEKQIKQLRNYRDNYQAFCKWLYDAKRRQDSLESMKFGDSNTVMRFLNEQKNLHSEISGKRDKSEEVQKIAELCANSIKDYELQLASYTSGLETLLNIPIKRTMIQSPSGVILQEAADVHARYIELLTRSGDYYRFLSEMLKSLEDLKLKNTKIEVLEEELRLARDANSENCNKNKFLDQNLQKYQAECSQFKAKLASLEELKRQAELDGKSAKQNLDKCYGQIKELNEKITRLTYEIEDEKRRRKSVEDRFDQQKNDYDQLQKARQCEKENLGWQKLESEKAIKEKEYEIERLRVLLQEEGTRKREYENELAKVRNHYNEEMSNLRNKYETEINITKTTIKEISMQKEDDSKNLRNQLDRLSRENRDLKDEIVRLNDSILQATEQRRRAEENALQQKACGSEIMQKKQHLEIELKQVMQQRSEDNARHKQSLEEAAKTIQDKNKEIERLKAEFQEEAKRRWEYENELSKVRNNYDEEIISLKNQFETEINITKTTIHQLTMQKEEDTSGYRAQIDNLTRENRSLSEEIKRLKNTLTQTTENLRRVEEDIQQQKATGSEVSQRKQQLEVELRQVTQMRTEESVRYKQSLDDAAKTIQDKNKEIERLKQLIDKETNDRKCLEDENARLQRVQYDLQKANSSATETINKLKVQEQELTRLRIDYERVSQERTVKDQDITRFQNSLKELQLQKQKVEEELNRLKRTASEDSCKRKKLEEELEGMRRSLKEQAIKITNLTQQLEQASIVKKRSEDDLRQQRDVLDGHLREKQRTQEELRRLSSEVEALRRQLLQEQESVKQAHLRNEHFQKAIEDKSRSLNESKIEIERLQSLTENLTKEHLMLEEELRNLRLEYDDLRRGRSEADSDKNATILELRSQLQISNNRTLELQGLINDLQRERENLRQEIEKFQKQALEASNRIQESKNQCTQVVQERESLLVKIKVLEQDKARLQRLEDELNRAKSTLEAETRVKQRLECEKQQIQNDLNQWKTQYSRKEEAIRKIESEREKSEREKNSLRSEIERLQAEIKRIEERCRRKLEDSTRETQSQLETERSRYQREIDKLRQRPYGSHRETQTECEWTVDTSKLVFDGLRKKVTAMQLYECQLIDKTTLDKLLKGKKSVEEVASEIQPFLRGAGSIAGASASPKEKYSLVEAKRKKLISPESTVMLLEAQAATGGIIDPHRNEKLTVDSAIARDLIDFDDRQQIYAAEKAITGFDDPFSGKTVSVSEAIKKNLIDRETGMRLLEAQIASGGVVDPVNSVFLPKDVALARGLIDRDLYRSLNDPRDSQKNFVDPVTKKKVSYVQLKERCRIEPHTGLLLLSVQKRSMSFQGIRQPVTVTELVDSGILRPSTVNELESGQISYDEVGERIKDFLQGSSCIAGIYNETTKQKLGIYEAMKIGLVRPGTALELLEAQAATGFIVDPVSNLRLPVEEAYKRGLVGIEFKEKLLSAERAVTGYNDPETGNIISLFQAMNKELIEKGHGIRLLEAQIATGGIIDPKESHRLPVDIAYKRGYFNEELSEILSDPSDDTKGFFDPNTEENLTYLQLKERCIKDEETGLCLLPLKEKKKQVQTSQKNTLRKRRVVIVDPETNKEMSVQEAYKKGLIDYETFKELCEQECEWEEITITGSDGSTRVVLVDRKTGSQYDIQDAIDKGLVDRKFFDQYRSGSLSLTQFADMISLKNGVGTSSSMGSGVSDDVFSSSRHESVSKISTISSVRNLTIRSSSFSDTLEESSPIAAIFDTENLEKISITEGIERGIVDSITGQRLLEAQACTGGIIHPTTGQKLSLQDAVSQGVIDQDMATRLKPAQKAFIGFEGVKGKKKMSAAEAVKEKWLPYEAGQRFLEFQYLTGGLVDPEVHGRISTEEAIRKGFIDGRAAQRLQDTSSYAKILTCPKTKLKISYKDAINRSMVEDITGLRLLEAASVSSKGLPSPYNMSSAPGSRSGSRSGSRSGSRSGSRSGSRRGSFDATGNSSYSYSYSFSSSSIGH

SEQ ID NO: 542 - protein, 967 aa, Homo Sapiens
MAKGFYISKSLGILGILLGVAAVCTIIALSVVYSQEKNKNANSSPVASTTPSASATTNPASATTLDQSKAWNRYRLPNTLKPDSYRVTLRPYLTPNDRGLYVFKGSSTVRFTCKEATDVIIIHSKKLNYTLSQGHRVVLRGVGGSQPPDIDKTELVEPTEYLVVHLKGSLVKDSQYEMDSEFEGELADDLAGFYRSEYMEGNVRKVVATTQMQAADARKSFPCFDEPAMKAEFNITLIHPKDLTALSNMLPKGPSTPLPEDPNWNVTEFHTTPKMSTYLLAFIVSEFDYVEKQASNGVLIRIWARPSAIAAGHGDYALNVTGPILNFFAGHYDTPYPLPKSDQIGLPDFNAGAMENWGLVTYRENSLLFDPLSSSSSNKERVVTVIAHELAHQWFGNLVTIEWWNDLWLNEGFASYVEYLGADYAEPTWNLKDLMVLNDVYRVMAVDALASSHPLSTPASEINTPAQISELFDAISYSKGASVLRMLSSFLSEDVFKQGLASYLHTFAYQNTIYLNLWDHLQEAVNNRSIQLPTTVRDIMNRWTLQMGFPVITVDTSTGTLSQEHFLLDPDSNVTRPSEFNYVWIVPITSIRDGRQQQDYWLIDVRAQNDLFSTSGNEWVLLNLNVTGYYRVNYDEENWRKIQTQLQRDHSAIPVINRAQIINDAFNLASAHKVPVTLALNNTLFLIEERQYMPWEAALSSLSYFKLMFDRSEVYGPMKNYLKKQVTPLFIHFRNNTNNWREIPENLMDQYSEVNAISTACSNGVPECEEMVSGLFKQWMENPNNNPIHPNLRSTVYCNAIAQGGEEEWDFAWEQFRNATLVNEADKLRAALACSKELWILNRYLSYTLNPDLIRKQDATSTIISITNNVIGQGLVWDFVQSNWKKLFNDYGGGSFSFSNLIQAVTRRFSTEYELQQLEQFKKDNEETGFGSGTRALEQALEKTKANIKWVKENKEVVLQWFTENSK

SEQ ID NO: 543 - protein, 308 aa, Homo Sapiens
TPRLAPAAERRLWNVRLLSRESPSGTMKAVLRKAGGTGPGEEKQFLEVWEKNRKLKSFNLSALEKHGPVYEDDCFGCLSWSHSETHLLYVAEKKRPKAESFFQTKALDVSASDDEIARLKKPDQAIKGDQFVFYEDWGENMVSKSIPVLCVLDVESGNISVLEGVPENVSPGQAFWAPGDAGVVFVGWWHEPFRLGIRFCTNRRSALYYVDLIGGKCELLSDDSLAVSSPRLSPDQCRIVYLQYPSLIPHHQCSQLCLYDWYTKVTSVVVDVVPRQLGENFSGIYCSLLPLGCWSADSQRVVFDSAQR

SEQ ID NO: 544 - protein, 95 aa, Homo Sapiens [sequence omitted]

SEQ ID NO: 545 - protein, 374 aa, Homo Sapiens
MAIRKKSTKSPPVLSHEFVLQNHADIVSCVAMVFLLGLMFEITAKASIIFVTLQYNVTLPATEEQATESVSLYYYGIKDLATVFFYMLVAIIIHAVIQEYMLDKINRRMHFSKTKHSKFNESGQLSAFYLFACVWGTFILISENYISDPTILWRAYPHNLMTFQMKFFYISQLAYWLHAFPELYFQKTKKEDIPRQLVYIGLYLFHIAGAYLLNLNHLGLVLLVLHYFVEFLFHISRLFYFSNEKYQKGFSLWAVLFVLGRLLTLILSVLTVGFGLARAENQKLDFSTGNFNVLAVRIAVLASICVTQAFMMWKFINFQLRRWREHSAFQAPAVKKKPTVTKGRSSKKGTENGVNGTLTSNVADSPRNKKEKSS

SEQ ID NO: 546 - protein, 186 aa, Homo Sapiens
MDSAGQDINLNSPNKGLLSDSMTDVPVDTGVAARTPAVEGLTEAEEEELRAELTKVEEEIVTLRQVLAAKERHCGELKRRLGLSTLGELKQNLSRSWHDVQVSSAYKKTQETLSQAGQKTSAALSTVGSAISRKLGDMRNSATFKSFEDRVGTIKSKVVGDRENGSDNLPSSAGSGDKPLSDPAPF

SEQ ID NO: 547 - protein, 534 aa, Homo Sapiens
MIWYILIIGILLPQSLAHPGFFTSIGQMTDLIHTEKDLVTSLKDYIKAEEDKLEQIKKWAEKLDRLTSTATKDPEGFVGHPVNAFKLMKRLNTEWSELENLVLKDMSDGFISNLTIQRQYFPNDEDQVGAAKALLRLQDTYNLDTDTISKGNLPGVKHKSFLTAEDCFELGKVAYTEADYYHTELWMEQALRQLDEGEISTIDKVSVLDYLSYAVYQQGDLDKALLLTKKLLELDPEHQRANGNLKYFEYIMAKEKDVNKSASDDQSDQKTTPKKKGVAVDYLPERQKYEMLCRGEGIKMTPRRQKKLFCRYHDGNRNPKFILAPAKQEDEWDKPRIIRFHDIISDAEIEIVKDLAKPRLRRATISNPITGDLETVHYRISKSAWLSGYENPVVSRINMRIQDLTGLDVSTAEELQVANYGVGGQYEPHFDFARKDEPDAFKELGTGNRIATWLFYMSDVSAGGATVFPEVGASVWPKKGTAVFWYNLFASGEGDYSTRHAACPVLVGNKWVSNKWLHERGQEFRRPCTLSELE

SEQ ID NO: 548 - protein, 425 aa, Homo Sapiens
MADKEAAFDDAVEERVINEEYKIWKKNTPFLYDLVMTHALEWPSLTAQWLPDVTRPEGKDFSIHRLVLGTHTSDEQNHLVIASVQLPNDDAQFDASHYDSEKGEFGGFGSVSGKIEIEIKINHEGEVNRARYMPQNPCIIATKTPSSDVLVFDYTKHPSKPDPSGECNPDLRLRGHQKEGYGLSWNPNLSGHLLSASDDHTICLWDISAVPKEGKVVDAKTIFTGHTAVVEDVSWHLLHESLFGSVADDQKLMIWDTRSNNTSKPSHSVDAHTAEVNCLSFNPYSEFILATGSADKTVALWDLRNLKLKLHSFESHKDEIFQVQWSPHNETILASSGTDRRLNVWDLSKIGEEQSPEDAEDGPPELLFIHGGHTAKISDFSWNPNEPWVICSVSEDNIMQVWQMAENIYNDEDPEGSVDPEGQGS

SEQ ID NO: 549 - protein, 546 aa, Homo Sapiens
MGAYLSQPNTVKCSGDGVGAPRLPLPYGFSAMQGWRVSMEDAHNCIPELDSETAMFSVYDGHGGEEVALYCAKYLPDIIKDQKAYKEGKLQKALEDAFLAIDAKLTTEEVIKELAQIAGRPTEDEDEKEKVADEDDVDNEEAALLHEEATMTIEELLTRYGQNCHKGPPHSKSGGGTGEEPGSQGLNGEAGPEDSTRETPSQENGPTAKAYTGFSSNSERGTEAGQVGEPGIPTGEAGPSCSSASDKLPRVAKSKFFEDSEDESDEAEEEEEDSEECSEEEDGYSSEEAENEEDEDDTEEAEEDDEEEEEEMMVPGMEGKEEPGSDSGTTAVVALIRGKQLIVANAGDSRCVVSEAGKALDMSYDHKPEDEVELARIKNAGGKVTMDGRVNGGLNLSRAIGDHFYKRNKNLPPEEQMISALPDIKVLTLTDDHEFMVIACDGIWNVMSSQEVVDFIQSKISQRDENGELRLLSSIVEELLDQCLAPDTSGDGTGCDNMTCIIICFKPRNTAELQPESGKRKLEEVLSTEGAEENGNSDKKKKAKRD

SEQ ID NO: 550 - protein, 286 aa, Homo Sapiens
MSEAGEEQPMETTGATENGHEAVPEGESPAGAGTGAAAGAGGATAAPPSGNQNGAEGDQINASKNEEDAGKMFVGGLSWDTSKKDLKDYFTKFGEVVDCTIKMDPNTGRSRGFGFILFKDAASVEKVLDQKEHRLDGRVIDPKKAMAMKKDPVKKIFVGGLNPESPTEEKIREYFGEFGEIEAIELPMDPKLNKRRGFVFITFKEEEPVKKVLEKKFHTVSGSKCEIKVAQPKEVYQQQQYGSGGRGNRNRGNRGSGGGGGGGGQGSTNYGKSQRRGGHQNNYKPY

SEQ ID NO: 551 - protein, 142 aa, Homo Sapiens
MAAAVAAAGAGEPQSPDELLPKGDAEKPEEELEEDDDEELDETLSERLWGLTEMFPERVRSAAGATFDLSLFVAQKMYRFSRAALWIGTTSFMILVLPVVFETEKLQMEQQQQLQQRQILLGPNTGLSGGMPGALPSLPGKI

SEQ ID NO: 552 - protein, 207 aa, Homo Sapiens
MALLFARSLRLCRWGAKRLGVASTEAQRGVSFKLEEKTAHSSLALFRDDMGVKYGLVGLEPTKVALNVERFREWAVVLADTAVTSGRHYWEVTVKRSQQFRIGVADVDMSRDSCIGVDDRSWVFTYAQRKWYTMLANEKAPVEGIGQPEKVGLLLEYEAQKLSLVDVSQVSVVHTLQTDFRGPVVPAFALWDGELLTHSGLEVPEGL

SEQ ID NO: 553 - protein, 294 aa, Homo Sapiens
MASASGAMAKHEQILVLDPPTDLKFKGPFTDVVTTNLKLRNPSDRKVCFKVKTTAPRRYCVRPNSGIIDPGSTVTVSVMLQPFDYDPNEKSKHKFMVQTIFAPPNTSDMEAVWKEAKPDELMDSKLRCVFEMPNENDKLGITPPGNAPTVTSMSSINNTVATPASYHTKDDPRGLSVLKQEKQKNDMEPSKAVPLNASKQDGPMPKPHSVSLNDTETRKLMEECKRLQGEMMKLSEENRHLRDEGLRLRKVAHSDKPGSTSTASFRDNVTSPLPSLLVVIAAIFIGFFLGKFIL

SEQ ID NO: 554 - protein, 320 aa, Homo Sapiens
MPMYQVKPYHGGGAPLRVELPTCMYRLPNVHGRSYGPAPGAGHVQEESNLSLQALESRQDDILKRLYELKAAVDGLSKMIQTPDADLDVTNIIQADEPTTLTTNALDLNSVLGKDYGALKDIVINANPASPPLSLLVLHRLLCEHFRVLSTVHTHSSVKSVPENLLKCFGEQNKKQPRQDYQLGFTLIWKNVPKTQMKFSIQTMCPIEGEGNIARFLFSLFGQKHNAVNATLIDSWVDIAIFQLKEGSSKEKAAVFRSMNSALGKSPWLAGNELTVADVVLWSVLQQIGGCSVTVPANVQRWMRSCENLAPFNTALKLLK

SEQ ID NO: 555 - protein, 687 aa, Homo Sapiens
MAEELVLERCDLELETNGRDHHTADLCREKLVVRRGQPFWLTLHFEGRNYEASVDSLTFSVVTGPAPSQEAGTKARFPLRDAVEEGDWTATVVDQQDCTLSLQLTTPANAPIGLYRLSLEASTGYQGSSFVLGHFILLFNAWCPADAVYLDSEEERQEYVLTQQGFIYQGSAKFIKNIPWNFGQFEDGILDICLILLDVNPKFLKNAGRDCSRRSSPVYVGRVVSGMVNCNDDQGVLLGRWDNNYGDGVSPMSWIGSVDILRRWKNHGCQRVKYGQCWVFAAVACTVLRCLGIPTRVVTNYNSAHDQNSNLLIEYFRNEFGEIQGDKSEMIWNFHCWVESWMTRPDLQPGYEGWQALDPTPQEKSEGTYCCGPVPVRAIKEGDLSTKYDAPFVFAEVNADVVDWIQQDDGSVHKSINRSLIVGLKISTKSVGRDEREDITHTYKYPEGSSEEREAFTRANHLNKLAEKEETGMAMRIRVGQSMNMGSDFDVFAHITNNTAEEYVCRLLLCARTVSYNGILGPECGTKYLLNLNLEPFSEKSVPLCILYEKYRDCLTESNLIKVRALLVEPVINSYLLAERDLYLENPEIKIRILGEPKQKRKLVAEVSLQNPLPVALEGCTFTVEGAGLTEEQKTVEIPDPVEAGEEVKVRMDLLPLHMGLHKLVVNFESDKLKAVKGFRNVIIGPA

SEQ ID NO: 556 - protein, 494 aa, Homo Sapiens
MPRVYIGRLSYQARERDVERFFKGYGKILEVDLKNGYGFVEFDDLRDADDAVYELNGKDLCGERVIVEHARGPRRDGSYGSGRSGYGYRRSGRDKYGPPTRTEYRLIVENLSSRCSWQDLKDYMRQAGEVTYADAHKGRKNEGVIEFVSYSDMKRALEKLDGTEVNGRKIRLVEDKPGSRRRRSYSRSRSHSRSRSRSRHSRKSRSRSGSSKSSHSKSRSRSRSGSRSRSKSRSRSQSRSRSKKEKSRSPSKEKSRSRSHSAGKSRSKSKDQAEEKIQNNDNVGKPKSRSPSRHKSKSKSRSRSQERRVEEEKRGSVSRGRSQEKSLRQSRSRSRSKGGSRSRSRSRSKSKDKRKGRKRSREESRSRSRSRSKSERSRKRGSKRDSKAGSSKKKKKEDTDRSQSRSPSRSVSKEREHAKSESSQREGRGESENAGTNQETRSRSRSNSKSKPNLPSESRSRSKSASKTRSRSKSRSRSASRSPSRSRSRSHSRS

SEQ ID NO: 557 - protein, 347 aa, Homo Sapiens
MAQSRDGGNPFAEPSELDNPFQDPAVIQHRPSRQYATLDVYNPFETREPPPAYEPPAPAPLPPPSAPSLQPSRKLSPTEPKNYGSYSTQASAAAATAELLKKQEELNRKAEELDRRERELQHAALGGTATRQNNWPPLPSFCPVQPCFFQDISMEIPQEFQKTVSTMYYLWMCSTLALLLNFLACLASFCVETNNGAGFGLSILWVLLFTPCSFVCWYRPMYKAFRSDSSFNFFVFFFIFFVQDVLFVLQAIGIPGWGFSGWISALVVPKGNTAVSVLMLLVALLFTGIAVLGIVMLKRIHSLYRRTGASFQKAQQEFAAGVFSNPAVRTAAANAAAGAAENAFRAP

SEQ ID NO: 558 - protein, 895 aa, Homo Sapiens
MFPTGFSSPSPSAAAAAQEVRSATDGNTSTTPPTSAKKRKLNSSSSSSSNSSNEREDFDSTSSSSSTPPLQPRDSASPSTSSFCLGVSVAASSHVPIQKKLRFEDTLEFVGFDAKMAEESSSSSSSSSPTAATSQQQQLKNKSILISSVASVHHANGLAKSSTTVSSFANSKPGSAKKLVIKNFKDKPKLPENYTDETWQKLKEAVEAIQNSTSIKYNLEELYQAVENLCSYKISANLYKQLRQICEDHIKAQIHQFREDSLDSVLFLKKIDRCWQNHCRQMIMIRSIFLFLDRTYVLQNSMLPSIWDMGLELFRAHIISDQKVQNKTIDGILLLIERERNGEAIDRSLLRSLLSMLSDLQIYQDSFEQRFLEETNRLYAAEGQKLMQEREVPEYLHHVNKRLEEEADRLITYLDQTTQKSLIATVEKQLLGEHLTAILQKGLNNLLDENRIQDLSLLYQLFSRVRGGVQVLLQQWIEYIKAFGSTIVINPEKDKTMVQELLDFKDKVDHIIDICFLKNEKFINAMKEAFETFINKRPNKPAELIAKYVDSKLRAGNKEATDEELEKMLDKIMIIFRFIYGKDVFEAFYKKDLAKRLLVGKSASVDAEKSMLSKLKHECGAAFTSKLEGMFKDMELSKDIMIQFKQYMQNQNVPGNIELTVNILTMGYWPTYVPMEVHLPPEMVKLQEIFKTFYLGKHSGRKLQWQSTLGHCVLKAEFKEGKKELQVSLFQTLVLLMFNEGEEFSLEEIKQATGIEDGELRRTLQSLACGKARVLAKNPKGKDIEDGDKFICNDDFKHKLFRIKINQIQMKETVEEQASTTERVFQDRQYQIDAAIVRIMKMRKTLSHNLLVSEVYNQLKFPVKPADLKKRIESLIDRDYMERDKENPNQYNYIA

SEQ ID NO: 559 - protein, 339 aa, Homo Sapiens
MAAERQEALREFVAVTGAEEDRARFFLESAGWDLQIALASFYEDGGDEDIVTISQATPSSVSRGTAPSDNRVTSFRDLIHDQDEDEEEEEGQRFYAGGSERSGQQIVGPPRKKSPNELVDDLFKGAKEHGAVAVERVTKSPGETSKPRVHVVLKLWKSGFSLDNGELRSYQDPSNAQFLESIRRGEVPAELRRLAHGGQVNLDMEDHRDEDFVKPKGAFKAFTGEGQKLGSTAPQVLSTSSPAQQAENEAKASSSILIDESEPTTNIQIRLADGGRLVQKFNHSHRISDIRLFIVDARPAMAATSFILMTTFPNKELADESQTLKEANLLNAVIVQRLT

SEQ ID NO: 560 - protein, 358 aa, Homo Sapiens
MAPQNLSTFCLLLLYLIGAVIAGRDFYKILGVPRSASIKDIKKAYRKLALQLHPDRNPDDPQAQEKFQDLGAAYEVLSDSEKRKQYDTYGEEGLKDGHQSSHGDIFSHFFGDFGFMFGGTPRQQDRNIPRGSDIIVDLEVTLEEVYAGNFVEVVRNKPVARQAPGKRKCNCRQEMRTTQLGPGRFQMTQEVVCDECPNVKLVNEERTLEVEIEPGVRDGMEYPFIGEGEPHVDGEPGDLRFRIKVVKHPIFERRGDDLYTNVTISLVESLVGFEMDITHLDGHKVHISRDKITRPGAKLWKKGEGLPNFDNNNIKGSLIITFDVDFPKEQLTEEAREGIKQLLKQGSVQKVYNGLQGY

SEQ ID NO: 561 - protein, 620 aa, Homo Sapiens
MRGPNSGTEKGRLVIPEKQGFDFLCMPVFHPRFKREFIQEPAKNRPGPQTRSDLLLSGRDWNTLIVGKLSPWIRPDSKVEKIRRNSEAAMLQELNFGAYLGLPAFLLPLNQEDNTNLARVLTNHIHTGHHSSMFWMRVPLVAPEDLRDDIIENAPTTHTEEYSGEEKTWMWWHNFRTLCDYSKRIAVALEIGADLPSNHVIDRWLGEPIKAAILPTSIFLTNKKGFPVLSKMHQRLIFRLLKLEVQFIITGTNHHSEKEFCSYLQYLEYLSQNRPPPNAYELFAKGYEDYLQSPLQPLMDNLESQTYEVFEKDPIKYSQYQQAIYKCLLDRVPEEEKDTNVQVLMVLGAGRGPLVNASLRAAKQADRRIKLYAVEKNPNAVVTLENWQFEEWGSQVTVVSSDMREWVAPEKADIIVSELLGSFADNELSPECLDGAQHFLKDDGVSIPGEYTSFLAPISSSKLYNEVRACREKDRDPEAQFEMPYVVRLHNFHQLSAPQPCFTFSHPNRDPMIDNNRYCTLEFPVEVNTVLHGFAGYFETVLYQDITLSIRPETHSPGMFSWFPILFPIKQPITVREGQTICVRFWRCSNSKKVWYEWAVTAPVCSAIHNPTGRSYTIGL

SEQ ID NO: 562 - protein, 95 aa, Homo Sapiens
MLFYSFFKSLVGKDVVVELKNDLSICGTLHSVDQYLNIKLTDISVTDPEKYPHMLSVKNCFIRGSVVRYVQLPADEVDTQLLQDAARKEALQQKQ

SEQ ID NO: 563 - protein, 807 aa, Homo Sapiens
MPKAPKQQPPEPEWIGDGESTSPSDKVVKKGKKDKKIKKTFFEELAVEDKQAGEEEKVLKEKEQQQQQQQQQQKKKRDTRKGRRKKDVDDDGEEKELMERLKKLSVPTSDEEDEVPAPKPRGGKKTKGGNVFAALIQDQSEEEEEEEKHPPKPAKPEKNRINKAVSEEQQPALKGKKGKEEKSKGKAKPQNKFAALDNEEEDKEEEIIKEKEPPKQGKEKAKKAEQMEYERQVASLKAANAAENDFSVSQAEMSSRQAMLENASDIKLEKFSISAHGKELFVNADLYIVAGRRYGLVGPNGKGKTTLLKHIANRALSIPPNIDVLLCEQEVVADETPAVQAVLRADTKRLKLLEEERRLQGQLEQGDDTAAERLEKVYEELRATGAAAAEAKARRILAGLGFDPEMQNRPTQKFSGGWRMRVSLARALFMEPTLLMLDEPTNHLDLNAVIWLNNYLQGWRKTLLIVSHDQGFLDDVCTDIIHLDAQRLHYYRGNYMTFKKMYQQKQKELLKQYEKQEKKLKELKAGGKSTKQAEKQTKEALTRKQQKCRRKNQDEESQEAPELLKRPKEYTVRFTFPDPPPLSPPVLGLHGVTFGYQGQKPLFKNLDFGIDMDSRICIVGPNGVGKSTLLLLLTGKLTPTHGEMRKNHRLKIGFFNQQYAEQLRMEETPTEYLQRGFNLPYQDARKCLGRFGLESHAHTIQICKLSGGQKARVVFAELACREPDVLILDEPTNNLDIESIDALGEAINEYKGAVIVVSHDARLITETNCQLWVVEEQSVSQIDGDFEDYKREVLEALGEVMVSRPRE

SEQ ID NO: 564 - protein, 407 aa, Homo Sapiens
MNNSGADEIGKLFVGGLDWSTTQETLRSYFSQYGEVVDCVIMKDKTTNQSRGFGFVKFKDPNCVGTVLASRPHTLDGRNIDPKPCTPRGMQPERTRPKEGWQKGPRSDNSKSNKIFVGGIPHNCGETELREYFKKFGVVTEVVMIYDAEKQRPRGFGFITFEDEQSVDQAVNMHFHDIMGKKVEVKRAEPRDSKSQAPGQPGASQWGSRVVPNAANGWAGQPPPTWQQGYGPQGMWVPAGQAIGGYGPPPAGRGAPPPPPPFTSYIVSTPPGGFPPPQGFPQGYGAPPQFSFGYGPPPPPPDQFAPPGVPPPPATPGAAPLAFPPPPSQAAPDMSKPPTAQPDFPYGQYAGYGQDLSGFGQGFSDPSQQPPSYGGPSVPGSGGPPAGGSGFGRGQNHNVQGFHPYRR

SEQ ID NO: 565 - protein, 587 aa, Homo Sapiens
MASEDIAKLAETLAKTQVAGGQLSFKGKSLKLNTAEDAKDVIKEIEDFDSLEALRLEGNTVGVEAARVIAKALEKKSELKRCHWSDMFTGRLRTEIPPALISLGEGLITAGAQLVELDLSDNAFGPDGVQGFEALLKSSACFTLQELKLNNCGMGIGGGKILAAALTECHRKSSAQGKPLALKVFVAGRNRLENDGATALAEAFRVIGTLEEVHMPQNGINHPGITALAQAFAVNPLLRVINLNDNTFTEKGAVAMAETLKTLRQVEVINFGDCLVRSKGAVAIADAIRGGLPKLKELNLSFCEIKRDAALAVAEAMADKAELEKLDLNGNTLGEEGCEQLQEVLEGFNMAKVLASLSDDEDEEEEEEGEEEEEEAEEEEEEDEEEEEEEEEEEEEEPQQRGQGEKSATPSRKILDPNTGEPAPVLSSPPPADVSTFLAFPSPEKLLRLGPKSSVLIAQQTDTSDPEKVVSAFLKVSSVFKDEATVRMAVQDAVDALMQKAFNSSSFNSNTFLTRLLVHMGLLKSEDKVKAIANLYGPLMALNHMVQQDYFPKALAPLLLAFVTKPNSALESCSFARHSLLQTLYKV

SEQ ID NO: 566 - protein, 149 aa, Homo Sapiens
MASSDIQVKELEKRASGQAFELILSPRSKESVPEFPLSPPKKKDLSLEEIQKKLEAAEERRKSHEAEVLKQLAEKREHEKEVLQKAIEENNNFSKMAEEKLTHKMEANKENREAQMAAKLERLREKDKHIEEVRKNKESKDPADETEAD

SEQ ID NO: 567 - protein, 327 aa, Homo Sapiens
MAAAAAAAAATNGTGGSSGMEVDAAVVPSVMACGVTGSVSVALHPLVILNISDHWIRMRSQEGRPVQVIGALIGKQEGRNIEVMNSFELLSHTVEEKIIIDKEYYYTKEEQFKQVFKELEFLGWYTTGGPPDPSDIHVHKQVCEIIESPLFLKLNPMTKHTDLPVSVFESVIDIINGEATMLFAELTYTLATEEAERIGVDHVARMTATGSGENSTVAEHLIAQHSAIKMLHSRVKLILEYVKASEAGEVPFNHEILREAYALCHCLPVLSTDKFKTDFYDQCNDVGLMAYLGTITKTCNTMNQFVNKFNVLYDRQGIGRRMRGLFF

SEQ ID NO: 568 - protein, 669 aa, Homo Sapiens
MKIFVGNVDGADTTPEELAALFAPYGTVMSCAVMKQFAFVHMRENAGALRAIEALHGHELRPGRALVVEMSRPRPLNTWKIFVGNVSAACTSQELRSLFERRGRVIECDVVKDYAFVHMEKEADAKAAIAQLNGKEVKGKRINVELSTKGQKKGPGLAVQSGDKTKKPGAGDTAFPGTGGFSATFDYQQAFGNSTGGFDGQARQPTPPFFGRDRSPLRRSPPRASYVAPLTAQPATYRAQPSVSLGAAYRAQPSASLGVGYRTQPMTAQAASYRAQPSVSLGAPYRGQLASPSSQSAAASSLGPYGGAQPSASALSSYGGQAAAASSLNSYGAQGSSLASYGNQPSSYGAQAASSYGVRAAASSYNTQGAASSLGSYGAQAASYGAQSAASSLAYGAQAASYNAQPSASYNAQSAPYAAQQAASYSSQPAAYVAQPATAAAYASQPAAYAAQATTPMAGSYGAQPVVQTQLNSYGAQASMGLSGSYGAQSAAAATGSYGAAAAYGAQPSATLAAPYRTQSSASLAASYAAQQHPQAAASYRGQPGNAYDGAGQPSAAYLSMSQGAVANANSTPPPYERTRLSPPRASYDDPYKKAVAMSKRYGSDRRLAELSDYRRLSESQLSFRRSPTKSSLDYRRLPDAHSDYARYSGSYNDYLRAAQMHSGYQRRM

SEQ ID NO: 569 - protein, 2045 aa, Homo Sapiens
MAGRSHPGPLRPLLPLLVVAACVLPGAGGTCPERALERREEEANVVLTGTVEEILNVDPVQHTYSCKVRVWRYLKGKDLVARESLLDGGNKVVISGFGDPLICDNQVSTGDTRIFFVNPAPPYLWPAHKNELMLNSSLMRITLRNLEEVEFCVEDKPGTHFTPVPPTPPDACRGMLCGFGAVCEPNAEGPGRASCVCKKSPCPSVVAPVCGSDASTYSNECELQRAQCSQQRRIRLLSRGPCGSRDPCSNVTCSFGSTCARSADGLTASCLCPATCRGAPEGTVCGSDGADYPGECQLLRRACARQENVFKKFDGPCDPCQGALPDPSRSCRVNPRTRRPEMLLRPESCPARQAPVCGDDGVTYENDCVMGRSGAARGLLLQKVRSGQCQGRDQCPEPCRFNAVCLSRRGRPRCSCDRVTCDGAYRPVCAQDGRTYDSDCWRQQAECRQQRAIPSKHQGPCDQAPSPCLGVQCAFGATCAVKNGQAACECLQACSSLYDPVCGSDGVTYGSACELEATACTLGREIQVARKGPCDRCGQCRFGALCEAETGRCVCPSECVALAQPVCGSDGHTYPSECMLHVHACTHQISLHVASAGPCETCGDAVCAFGAVCSAGQCVCPRCEHPPPGPVCGSDGVTYGSACELREAACLQQTQIEEARAGPCEQAECGSGGSGSGEDGDCEQELCRQRGGIWDEDSEDGPCVCDFSCQSVPGSPVCGSDGVTYSTECELKKARCESQRGLYVAAQGACRGPTFAPLPPVAPLHCAQTPYGCCQDNITAARGVGLAGCPSACQCNPHGSYGGTCDPATGQCSCRPGVGGLRCDRCEPGFWNFRGIVTDGRSGCTPCSCDPQGAVRDDCEQMTGLCSCKPGVAGPKCGQCPDGRALGPAGCEADASAPATCAEMRCEFGARCVEESGSAHCVCPMLTCPEANATKVCGSDGVTYGNECQLKTIACRQGLQISIQSLGPCQEAVAPSTHPTSASVTVTTPGLLLSQALPAPPGALPLAPSSTAHSQTTPPPSSRPRTTASVPRTTVWPVLTVPPTAPSPAPSLVASAFGESGSTDGSSDEELSGDQEASGGGSGGLEPLEGSSVATPGPPVERASCYNSALGCCSDGKTPSLDAEGSNCPATKVFQGVLELEGVEGQELFYTPEMADPKSELFGETARSIESTLDDLFRNSDVKKDFRSVRLRDLGPGKSVRAIVDVHFDPTTAFRAPDVARALLRQIQVSRRRSLGVRRPLQEHVRFMDFDWFPAFITGATSGAIAAGATARATTASRLPSSAVTPRAPHPSHTSQPVAKTTAAPTTRRPPTTAPSRVPGRRPPAPQQPPKPCDSQPCFHGGTCQDWALGGGFTCSCPAGRGGAVCEKVLGAPVPAFEGRSFLAFPTLRAYHTLRLALEFRALEPQGLLLYNGNARGKDFLALALLDGRVQLRFDTGSGPAVLTSAVPVEPGQWHRLELSRHWRRGTLSVDGETPVLGESPSGTDGLNLDTDLFVGGVPEDQAAVALERTFVGAGLRGCIRLLDVNNQRLELGIGPGAATRGSGVGECGDHPCLPNPCHGGAPCQNLEAGRFHCQCPPGRVGPTCADEKSPCQPNPCHGAAPCRVLPEGGAQCECPLGREGTFCQTASGQDGSGPFLADFNGFSHLELRGLHTFARDLGEKMALEVVFLARGPSGLLLYNGQKTDGKGDFVSLALRDRRLEFRYDLGKGAAVIRSREPVTLGAWTRVSLERNGRKGALRVGDGPRVLGESPVPHTVLNLKEPLYVGGAPDFSKLARAAAVSSGFDGAIQLVSLGGRQLLTPEHVLRQVDVTSFAGHPCTRASGHPCLNGASCVPREAAYVCLCPGGFSGPHCEKGLVEKSAGDVDTLAFDGRTFVEYLNAVTESEKALQSNHFELSLRTEATQGLVLWSGKATERADYVALAIVDGHLQLSYNLGSQPVVLRSTVPVNTNRWLRVVAHREQREGSLQVGNEAPVTGSSPLGATQLDTDGALWLGGLPELPVGPALPKAYGTGFVGCLRDVVVGRHPLHLLEDAVTKPELRPCPTP

SEQ ID NO: 570 - protein, 548 aa, Homo Sapiens
MVLAELYVSDREGSDATGDGTKEKPFKTGLKALMTVGKEPFPTIYVDSQKENERWNVISKSQLKNIKKMWHREQMKSESREKKEAEDSLRREKNLEEAKKITIKNDPSLPEPKCVKIGALEGYRGQRVKVFGWVHRLRRQGKNLMFLVLRDGTGYLQCVLADELCQCYNGVLLSTESSVAVYGMLNLTPKGKQAPGGHELSCDFWELIGLAPAGGADNLINEESDVDVQLNNRHMMIRGENMSKILKARSMVTRCFRDHFFDRGYYEVTPPTLVQTQVEGGATLFKLDYFGEEAFLTQSSQLYLETCLPALGDVFCIAQSYRAEQSRTRRHLAEYTHVEAECPFLTFDDLLNRLEDLVCDVVDRILKSPAGSIVHELNPNFQPPKRPFKRMNYSDAIVWLKEHDVKKEDGTFYEFGEDIPEAPERLMTDTINEPILLCRFPVEIKSFYMQRCPEDSRLTESVDVLMPNVGEIVGGSMRIFDSEEILAGYKREGIDPTPYYWYTDQRKYGTCPHGGYGLGLERFLTWILNRYHIRDVCLYPRFVQRCTP

SEQ ID NO: 571 - protein, 456 aa, Homo Sapiens
MKIEEVKSTTKTQRIASHSHVKGLGLDESGLAKQAASGLVGQENAREACGVIVELIKSKKMAGRAVLLAGPPGTGKTALALAIAQELGSKVPFCPMVGSEVYSTEIKKTEVLMENFRRAIGLRIKETKEVYEGEVTELTPCETENPMGGYGKTISHVIIGLKTAKGTKQLKLDPSIFESLQKERVEAGDVIYIEANSGAVKRQGRCDTYATEFDLEAEEYVPLPKGDVHKKKEIIQDVTLHDLDVANARPQGGQDILSMMGQLMKPKKTEITDKLRGEINKVVNKYIDQGIAELVPGVLFVDEVHMLDIECFTYLHRALESSIAPIVIFASNRGNCVIRGTEDITSPHGIPLDLLDRVMIIRTMLYTPQEMKQIIKIRAQTEGINISEEALNHLGEIGTKTTLRYSVQLLTPANLLAKINGKDSIEKEHVEEISELFYDAKSSAKILADQQDKYMK

SEQ ID NO: 572 - protein, 188 aa, Homo Sapiens
MIIYRDLISHDEMFSDIYKIREIADGLCLEVEGKMVSRTEGNIDDSLIGGNASAEGPEGEGTESTVITGVDIVMNHHLQETSFTKEAYKKYIKDYMKSIKGKLEEQRPERVKPFMTGAAEQIKHILANFKNYQFFIGENMNPDGMVALLDYREDGVTPYMIFFKDGLEMEKCVSTRKWVKINNVKKTF

SEQ ID NO: 573 - protein, 835 aa, Homo Sapiens
MAASAAAASAAAASAASGSPGPGEGSAGGEKRSTAPSAAASASASAAASSPAGGGAEALELLEHCGVCRERLRPEREPRLLPCLHSACSACLGPAAPAAANSSGDGGAAGDGTVVDCPVCKQQCFSKDIVENYFMRDSGSKAATDAQDANQCCTSCEDNAPATSYCVECSEPLCETCVEAHQRVKYTKDHTVRSTGPAKSRDGERTVYCNVHKHEPLVLFCESCDTLTCRDCQLNAHKDHQYQFLEDAVRNQRKLLASLVKRLGDKHATLQKSTKEVRSSIRQVSDVQKRVQVDVKMAILQIMKELNKRGRVLVNDAQKVTEGQQERLERQHWTMTKIQKHQEHILRFASWALESDNNTALLLSKKLIYFQLHRALKMIVDPVEPHGEMKFQWDLNAWTKSAEAFGKIVAERPGTNSTGPAPMAPPRAPGPLSKQGSGSSQPMEVQEGYGFGSGDDPYSSAEPHVSGVKRSRSGEGEVSGLMRKVPRVSLERLDLDLTADSQPPVFKVFPGSTTEDYNLIVIERGAAAAATGQPGTAPAGTPGAPPLAGMAIVKEEETEAAIGAPPTATEGPETKPVLMALAEGPGAEGPRLASPSGSTSSGLEVVAPEGTSAPGGGPGTLDDSATICRVCQKPGDLVMCNQCEFCFHLDCHLPALQDVPGEEWSCSLCHVLPDLKEEDGSLSLDGADSTGVVAKLSPANQRKCERVLLALFCHEPCRPLHQLATDSTFSLDQPGGTLDLTLIRARLQEKLSPPYSSPQEFAQDVGRMFKQFNKLTEDKADVQSIIGLQRFFETRMNEAFGDTKFSAVLVEPPPMSLPGAGLSSQELSGGPGDGP

SEQ ID NO: 574 - protein, 763 aa, Homo Sapiens
MNQKTILVLLILAVITIFALVCVLLVGRGGDGGEPSQLPHCPSVSPSAQPWTHPGQSQLFADLSREELTAVMRFLTQRLGPGLVDAAQARPSDNCVFSVELQLPPKAAALAHLDRGSPPPAREALAIVFFGRQPQPNVSELVVGPLPHPSYMRDVTVERHGGPLPYHRRPVLFQEYLDIDQMIFNRELPQASGLLHHCCFYKHRGRNLVTMTTAPRGLQSGDRATWFGLYYNISGAGFFLHHVGLELLVNHKALDPARWTIQKVFYQGRYYDSLAQLEAQFEAGLVNVVLIPDNGTGGSWSLKSPVPPGPAPPLQFYPQGPRFSVQGSRVASSLWTFSFGLGAFSGPRIFDVRFQGERLVYEISLQEALAIYGGNSPAAMTTRYVDGGFGMGKYTTPLTRGVDCPYLATYVDWHFLLESQAPKTIRDAFCVFEQNQGLPLRRHHSDLYSHYFGGLAETVLVVRSMSTLLNYDYVWDTVFHPSGAIEIRFYATGYISSAFLFGATGKYGNQVSEHTLGTVHTHSAHFKVDLDVAGLENWVWAEDMVFVPMAVPWSPEHQLQRLQVTRKLLEMEEQAAFLVGSATPRYLYLASNHSNKWGHPRGYRIQMLSFAGEPLPQNSSMARGFSWERYQLAVTQRKEEEPSSSSVFNQNDPWAPTVDFSDFINNETIAGKDLVAWVTAGFLHIPHAEDIPNTVTVGNGVGFFLRPYNFFDEDPSFYSADSIYFRGDQDAGACEVNPLACLPQAAACAPDLPAFSHGGFSHN

SEQ ID NO: 575 - protein, 760 aa, Homo Sapiens
MMDQARSAFSNLFGGEPLSYTRFSLARQVDGDNSHVEMKLAVDEEENADNNTKANVTKPKRCSGSICYGTIAVIVFFLIGFMIGYLGYCKGVEPKTECERLAGTESPVREEPGEDFPAARRLYWDDLKRKLSEKLDSTDFTGTIKLLNENSYVPREAGSQKDENLALYVENQFREFKLSKVWRDQHFVKIQVKDSAQNSVIIVDKNGRLVYLVENPGGYVAYSKAATVTGKLVHANFGTKKDFEDLYTPVNGSIVIVRAGKITFAEKVANAESLNAIGVLIYMDQTKFPIVNAELSFFGHAHLGTGDPYTPGFPSFNHTQFPPSRSSGLPNIPVQTISRAAAEKLFGNMEGDCPSDWKTDSTCRMVTSESKNVKLTVSNVLKEIKILNIFGVIKGFVEPDHYVVVGAQRDAWGPGAAKSGVGTALLLKLAQMFSDMVLKDGFQPSRSIIFASWSAGDFGSVGATEWLEGYLSSLHLKAFTYINLDKAVLGTSNFKVSASPLLYTLIEKTMQNVKHPVTGQFLYQDSNWASKVEKLTLDNAAFPFLAYSGIPAVSFCFCEDTDYPYLGTTMDTYKELIERIPELNKVARAAAEVAGQFVIKLTHDVELNLDYERYNSQLLSFVRDLNQYRADIKEMGLSLQWLYSARGDFFRATSRLTTDFGNAEKTDRFVMKKLNDRVMRVEYHFLSPYVSPKESPFRHVFWGSGSHTLPALLENLKLRKQNNGAFNETLFRNQLALATWTIQGAANALSGDVWDIDNEF

SEQ ID NO: 576 - protein, 536 aa, Homo Sapiens
MSPRVVSNSSVLASQSVGITNVRTVFSNVFNNTTAFPILRGSNCHKITAPGLGKGQLVNLLPPENLPWCGGSQGPRMLRTCYVLCSQAGPPSRGWQSLSFDGGAFHLKGTGELTRALLVLRLCAWPPLVTHGLLLQAWSRRLLGSRLSGAFLRASVYGQFVAGETAEEVKGCVQQLRTLSLRPLLAVPTEEEPDSAAKSGEAWYEGNLGAMLRCVDLSRGLLEPPSLAEASLMQLKVTALTSTRLCKELASWVRRPGASLELSPERLAEAMDSGQNLQVSCLNAEQNQHLRASLSRLHRVAQYARAQHVRLLVDAEYTSLNPALSLLVAALAVRWNSPGEGGPWVWNTYQACLKDTFERLGRDAEAAHRAGLAFGVKLVRGAYLDKERAVAQLHGMEDPTQPDYEATSQSYSRCLELMLTHVARHGPMCHLMVASHNEESVRQATKRMWELGIPLDGTVCFGQLLGMCDHVSLALGQAGYVVYKSIPYGSLEEVIPYLIRRAQENRSVLQGARREQELLSQELWRRLLPGCRRIPH

SEQ ID NO: 577 - protein, 1068 aa, Homo Sapiens
MNSIKNVPARVLSRRPGHSLEAEREQFDKTQAISISKAINTQEAPVKEKHARRIILGTHHEKGAFTFWSYAIGLPLPSSSILSWKFCHVLHKVLRDGHPNVLHDCQRYRSNIREIGDLWGHLHDRYGQLVNVYTKLLLTKISFHLKHPQFPAGLEVTDEVLEKAAGTDVNNIFQLTVEMFDYMDCELKLSESVFRQLNTAIAVSQMSSGQCRLAPLIQVIQDCSHLYHYTVKLLFKLHSCLPADTLQGHRDRFHEQFHSLRNFFRRASDMLYFKRLIQIPRLPEGPPNFLRASALAEHIKPVVVIPEEAPEDEEPENLIEISTGPPAGEPVVVADLFDQTFGPPNGSVKDDRDLQIESLKREVEMLRSELEKIKLEAQRYIAQLKSQVNALEGELEEQRKQKQKALVDNEQLRHELAQLRAAQLEGERSQGLREEAERKASATEARYNKLKEKHSELVHVHAELLRKNADTAKQLTVTQQSQEEVARVKEQLAFQVEQVKRESELKLEEKSDQLEKLKRELEAKAGELARAQEALSHTEQSKSELSSRLDTLSAEKDALSGAVRQREADLLAAQSLVRETEAALSREQQRSSQEQGELQGRLAERESQEQGLRQRLLDEQFAVLRGAAAEAAGILQDAVSKLDDPLHLRCTSSPDYLVSRAQEALDAVSTLEEGHAQYLTSLADASALVAALTRFSHLAADTIINGGATSHLAPTDPADRLIDTCRECGARALELMGQLQDQQALRHMQASLVRTPLQGILQLGQELKPKSLDVRQEELGAVVDKEMAATSAAIEDAVRRIEDMMNQARHASSGVKLEVNERILNSCTDLMKAIRLLVTTSTSLQKEIVESGRGAATQQEFYAKNSRWTEGLISASKAVGWGATQLVEAADKVVLHTGKYEELIVCSHEIAASTAQLVAASKVKANKHSPHLSRLQECSRTVNERAANVVASTKSGQEQIEDRDTMDFSGLSLIKLKKQEMETQVRVLELEKTLEAERMRLGELRKQHYVLAGASGSPGEEVAIRPSTAPRSVTTKKPPLAQKPSVAPRQDHQLDKKDGIYPAQLVNY

SEQ ID NO: 578 - protein, 92 aa, Homo Sapiens [sequence omitted]

SEQ ID NO: 579 - protein, 550 aa, Homo Sapiens
MWKASAGHAVSIAQDDAGADDWETDPDFVNDVSEKEQRWGAKTVQGSGHQEHINIHKLRENVFQEHQTLKEKELETGPKASHGYGGKFGVEQDRMDKSAVGHEYQSKLSKHCSQVDSVRGFGGKFGVQMDRVDQSAVGFEYQGKTEKHASQKDYSSGFGGKYGVQADRVDKSAVGFDYQGKTEKHESQRDYSKGFGGKYGIDKDKVDKSAVGFEYQGKTEKHESQKDYVKGFGGKFGVQTDRQDKCALGWDHQEKLQLHESQKDYKTGFGGKFGVQSERQDSAAVGFDYKEKLAKHESQQDYSKGFGGKYGVQKDRMDKNASTFEDVTQVSSAYQKTVPVEAVTSKTSNIRANFENLAKEKEQEDRRKAEAERAQRMAKERQEQEEARRKLEEQARAKTQTPPVSPAPQPTEERLPSSPVYEDAASFKAELSYRGPVSGTEPEPVYSMEAADYREASSQQGLAYATEAVYESAEAPGHYPAEDSTYDEYENDLGITAVALYDYQAAGDDEISFDPDDIITNIEMIDDGWWRGVCKGRYGLFPANYVELRQ

SEQ ID NO: 580 - protein, 404 aa, Homo Sapiens
MAESVERLQQRVQELERELAQERSLQVPRSGDGGGGRVRIEKMSSEVVDSNPYSRLMALKRMGIVSDYEKIRTFAVAIVGVGGVGSVTAEMLTRCGIGKLLLFDYDKVELANMNRLFFQPHQAGLSKVQAAEHTLRNINPDVLFEVHNYNITTVENFQHFMDRISNGGLEEGKPVDLVLSCVDNFEARMTINTACNELGQTWMESGVSENAVSGHIQLIIPGESACFACAPPLVVAANIDEKTLKREGVCAASLPTTMGVVAGILVQNVLKFLLNFGTVSFYLGYNAMQDFFPTMSMKPNPQCDDRNCRKQQEEYKKKVAALPKQEVIQEEEEIIHEDNEWGIELVSEVSEEELKNFSGPVPDLPEGITVAYTIPKKQEDSVTELTVEDSGESLEDLMAKMKNM

SEQ ID NO: 581 - protein, 960 aa, Homo Sapiens
MWRLRRAAVACEVCQSLVKHSSGIKGSLPLQKLHLVSRSIYHSHHPTLKLQRPQLRTSFQQFSSLTNLPLRKLKFSPIKYGYQPRRNFWPARLATRLLKLRYLILGSAVGGGYTAKKTFDQWKDMIPDLSEYKWIVPDIVWEIDEYIDFEKIRKALPSSEDLVKLAPDFDKIVESLSLLKDFFTSGSPEETAFRATDRGSESDKHFRKVSDKEKIDQLQEELLHTQLKYQRILERLEKENKELRKLVLQKDDKGIHHRKLKKSLIDMYSEVLDVLSDYDASYNTQDHLPRVVVVGDQSAGKTSVLEMIAQARIFPRGSGEMMTRSPVKVTLSEGPHHVALFKDSSREFDLTKEEDLAALRHEIELRMRKNVKEGCTVSPETISLNVKGPGLQRMVLVDLPGVINTVTSGMAPDTKETIFSISKAYMQNPNAIILCIQDGSVDAERSIVTDLVSQMDPHGRRTIFVLTKVDLAEKNVASPSRIQQIIEGKLFPMKALGYFAVVTGKGNSSESIEAIREYEEEFFQNSKLLKTSMLKAHQVTTRNLSLAVSDCFWKMVRESVEQQADSFKATRFNLETEWKNNYPRLRELDRNELFEKAKNEILDEVISLSQVTPKHWEEILQQSLWERVSTHVIENIYLPAAQTMNSGTFNTTVDIKLKQWTDKQLPNKAVEVAWETLQEEFSRFMTEPKGKEHDDIFDKLKEAVKEESIKRHKWNDFAEDSLRVIQHNALEDRSISDKQQWDAAIYFMEEALQARLKDTENAIENMVGPDWKKRWLYWKNRTQEQCVHNETKNELEKMLKCNEEHPAYLASDEITTVRKNLESRGVEVDPSLIKDTWHQVYRRHFLKTALNHCNLCRRGFYYYQRHFVDSELECNDVVLFWRIQRMLAITANTLRQQLTNTEVRRLEKNVKEVLEDFAEDGEKKIKLLTGKRVQLAEDLKKVREIQEKLDAFIEALHQEK

SEQ ID NO: 582 - protein, 953 aa, Homo Sapiens
MTAAENVCYTLINVPMDSEPPSEISLKNDLEKGDVKSKTEALKKVIIMILNGEKLPGLLMTIIRFVLPLQDHTIKKLLLVFWEIVPKTTPDGRLLHEMILVCDAYRKDLQHPNEFIRGSTLRFLCKLKEAELLEPLMPAIRACLEHRHSYVRRNAVLAIYTIYRNFEHLIPDAPELIHDFLVNEKDASCKRNAFMMLIHADQDRALDYLSTCIDQVQTFGDILQLVIVELIYKVCHANPSERARFIRCIYNLLQSSSPAVKYEAAGTLVTLSSAPTAIKAAAQCYIDLIIKESDNNVKLIVLDRLIELKEHPAHERVLQDLVMDILRVLSTPDLEVRKKTLQLALDLVSSRNVEELVIVLKKEVIKTNNVSEHEDTDKYRQLLVRTLHSCSVRFPDMAANVIPVLMEFLSDNNEAAAADVLEFVREAIQRFDNLRMLIVEKMLEVFHAIKSVKIYRGALWILGEYCSTKEDIQSVMTEIRRSLGEIPIVESEIKKEAGELKPEEEITVGPVQKLVTEMGTYATQSALSSSRPTKKEEDRPPLRGFLLDGDFFVAASLATTLTKIALRYVALVQEKKKQNSFVAEAMLLMATILHLGKSSLPKKPITDDDVDRISLCLKVLSECSPLMNDIFNKECRQSLSHMLSAKLEEEKLSQKKESEKRNVTVQPDDPISFMQLTAKNEMNCKEDQFQLSLLAAMGNTQRKEAADPLASKLNKVTQLTGFSDPVYAEAYVHVNQYDIVLDVLVVNQTSDTLQNCTLELATLGDLKLVEKPSPLTLAPHDFANIKANVKVASTENGIIFGNIVYDVSGAASDRNCVVLSDIHIDIMDYIQPATCTDAEFRQMWAEFEWENKVTVNTNMVDLNDYLQHILKSTNMKCLTPEKALSGYCGFMAANLYARSIFGEDALANVSIEKPIHQGPDAAVTGHIRIRAKSQGMALSLGDKINLSQKKTSI

SEQ ID NO: 583 - protein, 108 aa, Homo Sapiens
MADPRVRQIKIKTGVVKRLVKEKVMYEKEAKQQEEKIEKMRAEDGENYDIKKQAEILQESRMMIPDCQRRLEAAYLDLQRILENEKDLEEAEEYKEARLVLDSVKLEA

SEQ ID NO: 584 - protein, 312 aa, Homo Sapiens
MADGDSGSERGGGGGPCGFQPASRGGGEQETQELASKRLDIQNKRFYLDVKQNAKGRFLKIAEVGAGGSKSRLTLSMAVAAEFRDSLGDFIEHYAQLGPSSPEQLAAGAEEGGGPRRALKSEFLVRENRKYYLDLKENQRGRFLRIRQTVNRGGGGFGAGPGPGGLQSGQTIALPAQGLIEFRDALAKLIDDYGGEDDELAGGPGGGAGGPGGGLYGELPEGTSITVDSKRFFFDVGCNKYGVFLRVSEVKPSYRNAITVPFKAWGKFGGAFCRYADEMKEIQERQRDKLYERRGGGSGGGEESEGEEVDED

SEQ ID NO: 585 - protein, 784 aa, Homo Sapiens
MTSPAAAQSREIDCLSPEAQKLAEARLAAKRAARAEAREIRMKELERQQKEEDSERYSRRSRRNTSASDEDERMSVGSRGSLRVEERPEKDFTEKGSRNMPGLSAATLASLGGTSSRRGSGDTSISIDTEASIREIKDSLAEVEEKYKKAMVSNAQLDNEKTNFMYQVDTLKDMLLELEEQLAESRRQYEEKNKEFEREKHAHSILQFQFAEVKEALKQREEMLEKHGIILNSEIATNGETSDTLNNVGYQGPTKMTKEELNALKSTGDGTLGRASEVEVKNEIVANVGKREILHNTEKEQHTEDTVKDCVDIEVFPAGENTEDQKSSEDTAPFLGTLAGATYEEQVQSQILESSSLPENTVQVESNEVMGAPDDRTRTPLEPSNCWSDLDGGNHTENVGEAAVTQVEEQAGTVASCPLGHSDDTVYHDDKCMVEVPQELETSTGHSLEKEFTNQEAAEPKEVPAHSTEVGRDHNEEEGEETGLRDEKPIKTEVPGSPAGTEGNCQEATGPSTVDTQNEPLDMKEPDEEKSDQQGEALDSSQKKTKNKKKKNKKKKSPVPVETLKDVKKELTYQNTDLSEIKEEEQVKSTDRKSAVEAQNEVTENPKQKIAAESSENVDCPENPKIKLDGKLDQEGDDVQTAAEEVLADGDTLDFEDDTVQSSGPRAGGEELDEGVAKDNAKIDGATQSSPAEPKSEDADRCTLPEHESPSQDISDACEAESTERCEMSEHPSQTVRKALDSNSLENDDLSAPGREPGHFNPESREDTRGGNEKGKSKEDCTMS

SEQ ID NO: 586 - protein, 1258 aa, Homo Sapiens
MGDMANNSVAYSGVKNSLKEANHDGDFGITLAELRALMELRSTDALRKIQESYGDVYGICTKLKTSPNEGLSGNPADLERREAVFGKNFIPPKKPKTFLQLVWEALQDVTLIILEIAAIVSLGLSFYQPPEGDNALCGEVSVGEEEGEGETGWIEGAAILLSVVCVVLVTAFNDWSKEKQFRGLQSRIEQEQKFTVIRGGQVIQIPVADITVGDIAQVKYGDLLPADGILIQGNDLKIDESSLTGESDHVKKSLDKDPLLLSGTHVMEGSGRMVVTAVGVNSQTGIIFTLLGAGGEEEEKKDEKKKEKKNKKQDGAIENRNKAKAQDGAAMEMQPLKSEEGGDGDEKDKKKANLPKKEKSVLQGKLTKLAVQIGKAGLLMSAITVIILVLYFVIDTFWVQKRPWLAECTPIYIQYFVKFFIIGVTVLVVAVPEGLPLAVTISLAYSVKKMMKDNNLVRHLDACETMGNATAICSDKTGTLTMNRMTVVQAYINEKHYKKVPEPEAIPPNILSYLVTGISVNCAYTSKILPPEKEGGLPRHVGNKTECALLGLLLDLKRDYQDVRNEIPEEALYKVYTFNSVRKSMSTVLKNSDGSYRIFSKGASEIILKKCFKILSANGEAKVFRPRDRDDIVKTVIEPMASEGLRTICLAFRDFPAGEPEPEWDNENDIVTGLTCIAVVGIEDPVRPEVPDAIKKCQRAGITVRMVTGDNINTARAIATKCGILHPGEDFLCLEGKDFNRRIRNEKGEIEQERIDKIWPKLRVLARSSPTDKHTLVKGIIDSTVSDQRQVVAVTGDGTNDGPALKKADVGFAMGIAGTDVAKEASDIILTDDNFTSIVKAVMWGRNVYDSISKFLQFQLTVNVVAVIVAFTGACITQDSPLKAVQMLWVNLIMDTLASLALATEPPTESLLLRKPYGRNKPLISRTMMKNILGHAFYQLVVVFTLLFAGEKFFDIDSGRNAPLHAPPSEHYTIVFNTFVLMQLFNEINARKIHGERNVFEGIFNNAIFCTIVLGTFVVQIIIVQFGGKPFSCSELSIEQWLWSIFLGMGTLLWGQLISTIPTSRLKFLKEAGHGTQKEEIPEEELAEDVEEIDHAERELRRGQILWFRGLNRIQTQMDVVNAFQSGSSIQGALRRQPSIASQHHDVTNISTPTHIRVVNAFRSSLYEGLEKPESRSSIHNFMTHPEFRIEDSEPHIPLIDDTDAEDDAPTKRNSSPPPSPNKNNNAVDSGIHLTIEMNKSATSSSPGSPLHSLETSL

SEQ ID NO: 587 - protein, 456 aa, Homo Sapiens
MASALSLGNKCDPFLRCVLCRGGGALQGPRGRGPDDFESQLSPPGSARRLVRSKRACGNPPDAFGLSRASVHPPLPRVSIGCSSGPGRAKRERVGGAAWRQRKMAASAAVFSRLRSGLRLGSRGLCTRLATPPRRAPDQAAEIGSRGSTKAQGPQQQPGSEGPSYAKKVALWLAGLLGAGGTVSVVYIFGNNPVDENGAKIPDEFDNDPILVQQLRRTYKYFKDYRQMIIEPTSPCLLPDPLQEPYYQPPYTLVLELTGVLLHPEWSLATGWRFKKRPGIETLFQQLAPLYEIVIFTSETGMTAFPLIDSVDPHGFISYRLFRDATRYMDGHHVKDISCLNRDPARVVVVDCKKEAFRLQPYNGVALRPWDGNSDDRVLLDLSAFLKTIALNGVEDVRTVLEHYALEDDPLAAFKQRQSRLEQEEQQRLAELSKSNKQNLFLGSLTSRLWPRSKQP

SEQ ID NO: 588 - protein, 743 aa, Homo Sapiens
MLHFNRCHHLKKITQKCFSSIHVKTDKHAQRFLSRTFALAELRKSWYSTHSLVGDKNIILMGPPGAGKTTVGRIIGQKLGCCVIDVDDDILEKTWNMSVSEKLQDVGNEQFLEEEGKAVLNFSASGSVISLTGSNPMHDASMWHLKKNGIIVYLDVPLLDLICRLKLMKTDRIVGQNSGTSMKDLLKFRRQYYKKWYDARVFCESGASPEEVADKVLNAIKRYQDVDSETFISTRHVWPEDCEQKVSAKFFSEAVIEGLASDGGLFVPAKEFPKLSCGEWKSLVGATYVERAQILLERCIHPADIPAARLGEMIETAYGENFACSKIAPVRHLSGNQFILELFHGPTGSFKDLSLQLMPHIFAHCIPPSCNYMILVATSGDTGSAVLNGFSRLNKNDKQRIAVVAFFPENGVSDFQKAQIIGSQRENGWAVGVESDFDFCQTAIKRIFNDSDFTGFLTVEYGTILSSANSINWGRLLPQVVYHASAYLDLVSQGFISFGSPVDVCIPTGNFGNILAAVYAKMMGIPIRKFICASNQNHVLTDFIKTGHYDLRERKLAQTFSPSIDILKSSNLERHLHLMANKDGQLMTELFNRLESQHHFQIEKALVEKLQQDFVADWCSEGECLAAINSTYNTSGYILDPHTAVAKVVADRVQDKTCPVIISSTAHYSKFAPAIMQALKIKEINETSSSQLYLLGSYNALPPLHEALLERTKQQEKMEYQVCAADMNVLKSHVEQLVQNQFI

SEQ ID NO: 589 - protein, 363 aa, Homo Sapiens
MAMRQTPLTCSGHTRPVVDLAFSGITPYGYFLISACKGAGQHLPRLSGQHDGKPMLRQGDTGDWIGTFLGHKGAVWGATLNKDATKAATAAADFTAKVWDAVSGDELMTLAHKHIVKTVDFTQDSNYLLTGGQDKLLRIYDLNKPEAEPKEISGHTSGIKKALWCSEDKQILSADDKTVRLWDHATMTEVKSLNFNMSVSSMEYIPEGEILVITYGRSIAFHSAVSLDPIKSFEAPATINSASLHPEKEFLVAGGEDFKLYKYDYNSGEELESYKGHFGPIHCVRFSPDGELYASGSEDGTLRLWQTVVGKTYGLWKCVLPEEDSGELAKPKIGFPETTEEELEEIASENSDCIFPSAPDVKA

SEQ ID NO: 590 - protein, 856 aa, Homo Sapiens
MDVRRLKVNELREELQRRGLDTRGLKAELAERLQAALEAEEPDDERELDADDEPGRPGHINEEVETEGGSELEGTAQPPPPGLQPHAEPGGYSGPDGHYAMDNITRQNQFYDTQVIKQENESGYERRPLEMEQQQAYRPEMKTEMKQGAPTSFLPPEASQLKPDRQQFQSRKRPYEENRGRGYFEHREDRRGRSPQPPAEEDEDDFDDTLVAIDTYNCDLHFKVARDRSSGYPLTIEGFAYLWSGARASYGVRRGRVCFEMKINEEISVKHLPSTEPDPHVVRIGWSLDSCSTQLGEEPFSYGYGGTGKKSTNSRFENYGDKFAENDVIGCFADFECGNDVELSFTKNGKWMGIAFRIQKEALGGQALYPHVLVKNCAVEFNFGQRAEPYCSVLPGFTFIQHLPLSERIRGTVGPKSKAECEILMMVGLPAAGKTTWAIKHAASNPSKKYNILGTNAIMDKMRVMGLRRQRNYAGRWDVLIQQATQCLNRLIQIAARKKRNYILDQTNVYGSAQRRKMRPFEGFQRKAIVICPTDEDLKDRTIKRTDEEGKDVPDHAVLEMKANFTLPDVGDFLDEVLFIELQREEADKLVRQYNEEGRKAGPPPEKRFDNRGGGGFRGRGGGGGFQRYENRGPPGGNRGGFQNRGGGSGGGGNYRGGFNRSGGGGYSQNRWGNNNRDNNNSNNRGSYNRAPQQQPPPQQPPPPQPPPQQPPPPPSYSPARNPPGASTYNKNSNIPGSSANTSTPTVSSYSPPQPSYSQPPYNQGGYSQGYTAPPPPPPPPPAYNYGSYGGYNPAPYTPPPPPTAQTYPQPSYNQYQQYAQQWNQYYQNQGQWPPYYGNYDYGSYSGNTQGGTSTQ

SEQ ID NO: 591 - protein, 240 aa, Homo Sapiens
MVGRRALIVLAHSERTSFNYAMKEAAAAALKKKGWEVVESDLYAMNFNPIISRKDITGKLKDPANFQYPAESVLAYKEGHLSPDIVAEQKKLEAADLVIFQSKKAVLSITTGGSGSMYSLQGIHGDMNVILWPIQSGILHFCGFQVLEPQLTYSIGHTPADARIQILEGWKKRLENIWDETPLYFAPSSLFDLNFQAGFLMKKEVQDEEKNKKFGLSVGHHLGKSIPTDNQKKKKKKKKK

SEQ ID NO: 592 - protein, 703 aa, Homo Sapiens
MLRGRSLSVTSLGGLPQWEVEELPVEELLLFEVAWEVTNKVGGIYTVIQTKAKTTADEWGENYFLIGPYFEHNMKTQVEQCEPVNDAVRRAVDAMNKHGCQVHFGRWLIEGSPYVVLFDIGYSAWNLDRWKGDLWEACSVGIPYHDREANDMLIFGSLTAWFLKEVTDHADGKYVVAQFHEWQAGIGLILSRARKLPIATIFTTHATLLGRYLCAANIDFYNHLDKFNIDKEAGERQIYHRYCMERASVHCAHVFTTVSEITAIEAEHMLKRKPDVVTPNGLNVKKFSAVHEFQNLHAMYKARIQDFVRGHFYGHLDFDLEKTLFLFIAGRYEFSNKGADIFLESLSRLNFLLRMHKSDITVMVFFIMPAKTNNFNVETLKGQAVRKQLWDVAHSVKEKFGKKLYDALLRGEIPDLNDILDRDDLTIMKRAIFSTQRQSLPPVTTHNMIDDSTDPILSTIRRIGLFNNRTDRVKVILHPEFLSSTSPLLPMDYEEFVRGCHLGVFPSYYEPWGYTPAECTVMGIPSVTTNLSGFGCFMQEHVADPTAYGIYIVDRRFRSPDDSCNQLTKFLYGFCKQSRRQRIIQRNRTERLSDLLDWRYLGRYYQHARHLTLSRAFPDKFHVELTSPPTTEGFKYPRPSSVPPSPSGSQASSPQSSDVEDEVEDERYDEEEEAERDRLNIKSPFSLSHVPHGKKKLHGEYKN

SEQ ID NO: 593 - protein, 479 aa, Homo Sapiens
MSDGFDRAPGAGRGRSRGLGRGGGGPEGGGFPNGAGPAERARHQPPQPKAPGFLQPPPLRQPRTTPPPGAQCEVPASPQRPSRPGALPEQTRPLRAPPSSQDKIPQQNSESAMAKPQVVVAPVLMSKLSVNAPEFYPSGYSSSYTESYEDGCEDYPTLSEYVQDFLNHLTEQPGSFETEIEQFAETLNGCVTTDDALQELVELIYQQATSIPNFSYMGARLCNYLSHHLTISPQSGNFRQLLLQRCRTEYEVKDQAAKGDEVTRKRFHAFVLFLGELYLNLEIKGTNGQVTRADILQVGLRELLNALFSNPMDDNLICAVKLLKLTGSVLEDAWKEKGKMDMEEIIQRIENVVLDANCSRDVKQMLLKLVELRSSNWGRVHATSTYREATPENDPNYFMNEPTFYTSDGVPFTAADPDYQEKYQELLEREDFFPDYEENGTDLSGAGDPYLDDIDDEMDPEIEEAYEKFCLESERKRKQ

SEQ ID NO: 594 - protein, 308 aa, Homo Sapiens [sequence omitted]

SEQ ID NO: 595 - protein, 398 aa, Homo Sapiens
MMLKGITRLISRIHKLDPGRFLHMGTQARQSIAAHLDNQVPVESPRAISRTNENDPAKHGDQHEGQHYNISPQDLETVFPHGLPPRFVMQVKTFSEACLMVRKPALELLHYLKNTSFAYPAIRYLLYGEKGTGKTLSLCHVIHFCAKQDWLILHIPDAHLWVKNCRDLLQSSYNKQRFDQPLEASTWLKNFKTTNERFLNQIKVQEKYVWNKRESTEKGSPLGEVVEQGITRVRNATDAVGIVLKELKRQSSLGMFHLLVAVDGINALWGRTTLKREDKSPIAPEELALVHNLRKMMKNDWHGGAIVSALSQTGSLFKPRKAYLPQELLGKEGFDALDPFIPILVSNYNPKEFESCIQYYLENNWLQHEKAPTEEGKKELLFLSNANPSLLERHCAYL

SEQ ID NO: 596 - protein, 1393 aa, Homo Sapiens
MACSIVQFCYFQDLQAARDFLFPHLREEILSGALRRDPSKSTDWEDDGWGAWEENEPQEPEEEGNTCKTQKTSWLQDCVLSLSPTNDLMVIAREQKAVFLVPKWKYSDKGKEEMQFAVGWSGSLNVEEGECVTSALCIPLASQKRSSTGRPDWTCIVVGFTSGYVRFYTENGVLLLAQLLNEDPVLQLKCRTYEIPRHPGVTEQNEELSILYPAAIVTIDGFSLFQSLRACRNQVAKAAASGNENIQPPPLAYKKWGLQDIDTIIDHASVGIMTLSPFDQMKTASNIGGFNAAIKNSPPAMSQYITVGSNPFTGFFYALEGSTQPLLSHVALAVASKLTSALFNAASGWLGWKSKHEEEAVQKQKPKVEPATPLAVRFGLPDSRRHGESICLSPCNTLAAVTDDFGRVILLDVARGIAIRMWKGYRDAQIGWIQTVEDLHERVPEKADFSPFGNSQGPSRVAQFLVIYAPRRGILEVWSTQQGPRVGAFNVGKHCRLLYPGYKIMGLNNVTSQSWQPQTYQICLVDPVSGSVKTVNVPFHLALSDKKSERAKDMHLVKKLAALLKTKSPNLDLVETEIKELILDIKYPATKKQALESILASERLPFSCLRNITQTLMDTLKSQELESVDEGLLQFCANKLKLLQLYESVSQLNSLDFHLDTPFSDNDLALLLRLDEKELLKLQALLEKYKQENTRTNVRFSDDKDGVLPVKTFLEYLEYEKDVLNIKKISEEEYVALGSFFFWKCLHGESSTEDMCHTLESAGLSPQLLLSLLLSVWLSKEKDILDKPQSICCLHTMLSLLSKMKVAIDETWDSQSVSPWWQQMRTACIQSENNGAALLSAHVGHSVAAQISNNMTEKKFSQTVLGADSEALTDSWEALSLDTEYWKLLLKQLEDCLILQTLLHSKGNTQTSKVSSLQAEPLPRLSVKKLLEGGKGGIADSVAKWIFKQDFSPEVLKLANEERDAENPDEPKEGVNRSFLEVSEMEMDLGAIPDLLHLAYEQFPCSLELDVLHAHCCWEYVVQWNKDPEEARFFVRSIEHLKQIFNAHVQNGIALMMWNTFLVKRFSAATYLMDKVGKSPKDRLCRRDVGMSDTAMTSFLGSCLDLLQILMEADVSRDEIQVPVLDTEDAWLSVEGPISIVELALEQKHIHYPLVEHHSILCSILYAVMRFSLKTVKPLSLFDSKGKNAFFKDLTSIQLLPSGEMDPNFISVRQQFLLKVVSAAVQAQHSATKVKDPTEEATPTPFGKDQDWPALAVDLAHHLQVSEDVVRRHYVGELYNYGVDHLGEEAILQVHDKEVLASQLLVLTGQRLAHALLHTQTKEGMELLARLPPTLCTWLKAMDPQDLQNTEVPIATTAKLVNKVIELLPEKHGQYGLALHLIEAVEAISLPSL

SEQ ID NO: 597 - protein, 86 aa, Homo Sapiens
MSLPLNPKPFLNGLTGKPVMVKLKWGMEYKGYLVSVDGYMNMQLANTEEYIDGALSGHLGEVLIRCNNVLYIRGVEEEEEDGEMRE

SEQ ID NO: 598 - protein, 878 aa, Homo Sapiens
MATEHPEPPKAELQLPPPPPPGHYGAWAAQELQAKLAEIGAPIQGNREELVERLQSYTRQTGIVLNRPVLRGEDGDKAAPPPMSAQLPGIPMPPPPLGLPPLQPPPPPPPPPPGLGLGFPMAHPPNLGPPPPLRVGEPVALSEEERLKLAQQQAALLMQQEERAKQAAVLLEQERQQEIAKMGTPVPRPPQDMGQIGVRTPLGPRVAAPVGPVGPTPTVLPMGAPVPRPRGPPPPPGDENREMDDPSVGPKIPQALEKILQLKESRQEEMNSQQEEEEMETDARSSLGQSASETEEDTVSVSKKEKNRKRRNRKKKKKPQRVRGVSSESSGDREKDSTRSRGSDSPAADVEIEYVTEEPEIYEPNFIFFKRIFEAFKLTDDVKKEKEKEPEKLDKLENSAAPKKKGFEEEHKDSDDDSSDDEQEKKPEAPKLSKKKLRRMNRFTVAELKQLVARPDVVEMHDVTAQDPKLLVHLKATRNSVPVPRHWCFKRKYLQGKRGIEKPPFELPDFIKRTGIQEMREALQEKEEQKTMKSKMREKVRPKMGKIDIDYQKLHDAFFKWQTKPKLTIHGDLYYEGKEFETRLKEKKPGDLSDELRISLGMPVGPNAHKVPPPWLIAMQRYGPPPSYPNLKIPGLNSPIPESCSFGYHAGGWGKPPVDETGKPLYGDVFGTNAAEFQTKTEEEEIDRTPWGELEPSDEESSEEEEEEESDEDKPDETGFITPADSGLITPGGFSSVPAGMETPELIELRKKKIEEAMDGSETPQLFTVLPEKRTATVGGAMMGSTHIYDMSTVMSRKGPAPELQGVEVALAPEELELDPMAMTQKYEEHVREQQAQVEKEDFSDMVAEHAAKQKQKKRKAQPQDSRGGSKKYKEFKF

SEQ ID NO: 599 - protein, 1200 aa, Homo Sapiens
MNPRQGYSLSGYYTHPFQGYEHRQLRYQQPGPGSSPSSFLLKQIEFLKGQLPEAPVIGKQTPSLPPSLPGLRPRFPVLLASSTRGRQVDIRGVPRGVHLRSQGLQRGFQHPSPRGRSLPQRGVDCLSSHFQELSIYQDQEQRILKFLEELGEGKATTAHDLSGKLGTPKKEINRVLYSLAKKGKLQKEAGTPPLWKIAVSTQAWNQHSGVVRPDGHSQGAPNSDPSLEPEDRNSTSVSEDLLEPFIAVSAQAWNQHSGVVRPDSHSQGSPNSDPGLEPEDSNSTSALEDPLEFLDMAEIKEKICDYLFNVSDSSALNLAKNIGLTKARDINAVLIDMERQGDVYRQGTTPPIWHLTDKKRERMQIKRNTNSVPETAPAAIPETKRNAEFLTCNIPTSNASNNMVTTEKVENGQEPVIKLENRQEARPEPARLKPPVHYNGPSKAGYVDFENGQWATDDIPDDLNSIRAAPGEFRAIMEMPSFYSHGLPRCSPYKKLTECQLKNPISGLLEYAQFASQTCEFNMIEQSGPPHEPRFKFQVVINGREFPPAEAGSKKVAKQDAAMKAMTILLEEAKAKDSGKSEESSHYSTEKESEKTAESQTPTPSATSFFSGKSPVTTLLECMHKLGNSCEFRLLSKEGPAHEPKFQYCVAVGAQTFPSVSAPSKKVAKQMAAEEAMKALHGEATNSMASDNQPEGMISESLDNLESMMPNKVRKIGELVRYLNTNPVGGLLEYARSHGFAAEFKLVDQSGPPHEPKFVYQAKVGGRWFPAVCAHSKKQGKQEAADAALRVLIGENEKAERMGFTELPLTGSTFHDQIAMLSHRCFNTLTNSFQPSLLGRKILAAIIMKKDSEDMGVVVSLGTGNRCVKGDSLSLKGETVNDCHAEIISRRGFIRFLYSELMKYNSQTAKDSIFEPAKGGEKLQIKKTVSFHLYISTAPCGDGALFDKSCSDRAMESTESRHYPVFENPKQGKLRTKVENGEGTIPVESSDIVPTWDGIRLGERLRTMSCSDKILRWNVLGLQGALLTHFLQPIYLKSVTLGYLFSQGHLTRAICCRVTRDGSAFEDGLRHPFIVNHPKVGRVSIYDSKRQSGKTKETSVNWCLADGYDLEILDGTRGTVDGPRNELSRVSKKNIFLLFKKLCSFRYRRDLLRLSYGEAKKAARDYETAKNYFKKGLKDMGYGNWISKPQEEKNFYLCPV

SEQ ID NO: 600 - protein, 124 aa, Homo Sapiens
MQPASAKWYDRRDYVFIEFCVEDSKDVNVNFEKSKLTFSCLRKGESGQSWPRLTKERAKLNWLSVDFNNWKDWEDDSDEDMSNFDRFSEMMNNMGGDEDVDLPEVDGADDDSQDSDDEKMPDLE

SEQ ID NO: 601 - protein, 559 aa, Homo Sapiens
MATATIALQVNGQQGGGSEPAAAAAVVAAGDKWKPPQGTDSIKMENGQSTAAKLGLPPLTPEQQEALQKAKKYAMEQSIKSVLVKQTIAHQQQQLTNLQMAAVTMGFGDPLSPLQSMAAQRQRALAIMCRVYVGSIYYELGEDTIRQAFAPFGPIKSIDMSWDSVTMKHKGFAFVEYEVPEAAQLALEQMNSVMLGGRNIKVGRPSNIGQAQPIIDQLAEEARAFNRIYVASVHQDLSDDDIKSVFEAFGKIKSCTLARDPTTGKHKGYGFIEYEKAQSSQDAVSSMNLFDLGGQYLRVGKAVTPPMPLLTPATPGGLPPAAAVAAAAATAKITAQEAVAGAAVLGTLGTPGLVSPALTLAQPLGTLPQAVMAAQAPGVITGVTPARPPIPVTIPSVGVVNPILASPPTLGLLEPKKEKEEEELFPESERPEMLSEQEHMSISGSSARHMVMQKLLRKQESTVMVLRNMVDPKDIDDDLEGEVTEECGKFGAVNRVIIYQEKQGEEEDAEIIVKIFVEFSIASETHKAIQALNGRWFAGRKVVAEVYDQERFDNSDLSA

SEQ ID NO: 602 - protein, 426 aa, Homo Sapiens
MANDSGGPGGPSPSERDRQYCELCGKMENLLRCSRCRSSFYCCKEHQRQDWKKHKLVCQGSEGALGHGVGPHQHSGPAPPAAVPPPRAGAREPRKAAARRDNASGDAAKGKVKAKPPADPAAAASPCRAAAGGQGSAVAAEAEPGKEEPPARSSLFQEKANLYPPSNTPGDALSPGGGLRPNGQTKPLPALKLALEYIVPCMNKHGICVVDDFLGKETGQQIGDEVRALHDTGKFTDGQLVSQKSDSSKDIRGDKITWIEGKEPGCETIGLLMSSMDDLIRHCNGKLGSYKINGRTKAMVACYPGNGTGYVRHVDNPNGDGRCVTCIYYLNKDWDAKVSGGILRIFPEGKAQFADIEPKFDRLLFFWSDRRNPHEVQPAYATRYAITVWYFDADERARAKVKYLTGEKGVRVELNKPSDSVGKDVF

SEQ ID NO: 603 - protein, 379 aa, Homo Sapiens
MSRSGTDPQQRQQASEADAAAATFRANDHQHIRYNPLQDEWVLVSAHRMKRPWQGQVEPQLLKTVPRHDPLNPLCPGAIRANGEVNPQYDSTFLFDNDFPALQPDAPSPGPSDHPLFQAKSARGVCKVMCFHPWSDVTLPLMSVPEIRAVVDAWASVTEELGAQYPWVQIFENKGAMMGCSNPHPHCQVWASSFLPDIAQREERSQQAYKSQHGEPLLMEYSRQELLRKERLVLTSEHWLVLVPFWATWPYQTLLLPRRHVRRLPELTPAERDDLASIMKKLLTKYDNLFETSFPYSMGWHGAPTGSEAGANWNHWQLHAHYYPPLLRSATVRKFMVGYEMLAQAQRDLTPEQAAERLRALPEVHYHLGQKDRETATIA

SEQ ID NO: 604 - protein, 493 aa, Homo Sapiens
MRGFGPGLTARRLLPLRLPPRPPGPRLASGQAAGALERAMDELLRRAVPPTPAYELREKTPAPAEGQCADFVSFYGGLAETAQRAELLGRLARGFGVDHGQVAEQSAGVLHLRQQQREAAVLLQAEDRLRYALVPRYRGLFHHISKLDGGVRFLVQLRADLLEAQALKLVEGPDVREMNGVLKGMLSEWFSSGFLNLERVTWHSPCEVLQKISEAEAVHPVKNWMDMKRRVGPYRRCYFFSHCSTPGEPLVVLHVALTGDISSNIQAIVKEHPPSETEEKNKITAAIFYSISLTQQGLQGVELGTFLIKRVVKELQREFPHLGVFSSLSPIPGFTKWLLGLLNSQTKEHGRNELFTDSECKEISEITGGPINETLKLLLSSSEWVQSEKLVRALQTPLMRLCAWYLYGEKHRGYALNPVANFHLQNGAVLWRINWMADVSLRGITGSCGLMANYRYFLEETGPNSTSYLGSKIIKASEQVLSLVAQFQKNSKL

SEQ ID NO: 605 - protein, 377 aa, Homo Sapiens
MDSALSDPHNGSAEAGGPTNSTTRPPSTPEGIALAYGSLLLMALLPIFFGALRSVRCARGKNASDMPETITSRDAARFPIIASCTLLGLYLFFKIFSQEYINLLLSMYFFVLGILALSHTISPFMNKFFPASFPNRQYQLLFTQGSGENKEEIINYEFDTKDLVCLGLSSIVGVWYLLRKHWIANNLFGLAFSLNGVELLHLNNVSTGCILLGGLFIYDVFWVFGTNVMVTVAKSFEAPIKLVFPQDLLEKGLEANNFAMLGLGDVVIPGIFIALLLRFDISLKKNTHTYFYTSFAAYIFGLGLTIFIMHIFKHAQPALLYLVPACIGFPVLVALAKGEVTEMFSYEESNPKDPAAVTESKEGTEASASKGLEKKEK

SEQ ID NO: 606 - protein, 795 aa, Homo Sapiens [sequence omitted]

SEQ ID NO: 607 - protein, 530 aa, Homo Sapiens
MADDIDIEAMLEAPYKKDENKLSSANGHEERSKKRKKSKSRSRSHERKRSKSKERKRSRDRERKKSKSRERKRSRSKERRRSRSRSRDRRFRGRYRSPYSGPKFNSAIRGKIGLPHSIKLSRRRSRSKSPFRKDKSPVREPIDNLTPEERDARTVFCMQLAARIRPRDLEEFFSTVGKVRDVRMISDRNSRRSKGIAYVEFVDVSSVPLAIGLTGQRVLGVPIIVQASQAEKNRAAAMANNLQKGSAGPMRLYVGSLHFNITEDMLRGIFEPFGRIESIQLMMDSETGRSKGYGFITFSDSECAKKALEQLNGFELAGRPMKVGHVTERTDASSASSFLDSDELERTGIDLGTTGRLQLMARLAEGTGLQIPPAAQQALQMSGSLAFGAVAEFSFVIDLQTRLSQQTEASALAAAASVQPLATQCFQLSNMFNPQTEEEVGWDTEIKDDVIEECNKHGGVIHIYVDKNSAQGNVYVKCPSIAAAIAAVNALHGRWFAGKMITAAYVPLPTYHNLFPDSMTATQLLVPSRR

SEQ ID NO: 608 - protein, 326 aa, Homo Sapiens
MSSFSESALEKKLSELSNSQQSVQTLSLWLIHHRKHAGPIVSVWHRELRKAKSNRKLTFLYLANDVIQNSKRKGPEFTREFESVLVDAFSHVAREADEGCKKPLERLLNIWQERSVYGGEFIQQLKLSMEDSKSPPPKATEEKKSLKRTFQQIQEEEDDDYPGSYSPQDPSAGPLLTEELIKALQDLENAASGDATVRQKIASLPQEVQDVSLLEKITDKEAAERLSKTVDEACLLLAEYNGRLAAELEDRRQLARMLVEYTQNQKDVLSEKEKKLEEYKQKLARVTQVRKELKSHIQSLPDLSLLPNVTGGLAPLPSAGDLFSTD

SEQ ID NO: 609 - protein, 1176 aa, Homo Sapiens
MAERKGTAKVDFLKKIEKEIQQKWDTERVFEVNASNLEKQTSKGKYFVTFPYPYMNGRLHLGHTFSLSKCEFAVGYQRLKGKCCLFPFGLHCTGMPIKACADKLKREIELYGCPPDFPDEEEEEEETSVKTEDIIIKDKAKGKKSKAAAKAGSSKYQWGIMKSLGLSDEEIVKFSEAEHWLDYFPPLAIQDLKRMGLKVDWRRSFITTDVNPYYDSFVRWQFLTLRERNKIKFGKRYTIYSPKDGQPCMDHDRQTGEGVGPQEYTLLKLKVLEPYPSKLSGLKGKNIFLVAATLRPETMFGQTNCWVRPDMKYIGFETVNGDIFICTQKAARNMSYQGFTKDNGVVPVVKELMGEEILGASLSAPLTSYKVIYVLPMLTIKEDKGTGVVTSVPSDSPDDIAALRDLKKKQALRAKYGIRDDMVLPFEPVPVIEIPGFGNLSAVTICDELKIQSQNDREKLAEAKEKIYLKGFYEGIMLVDGFKGQKVQDVKKTIQKKMIDAGDALIYMEPEKQVMSRSSDECVVALCDQWYLDYGEENWKKQTSQCLKNLETFCEETRRNFEATLGWLQEHACSRTYGLGTHLPWDEQWLIESLSDSTIYMAFYTVAHLLQGGNLHGQAESPLGIRPQQMTKEVWDYVFFKEAPFPKTQIAKEKLDQLKQEFEFWYPVDLRVSGKDLVPNHLSYYLYNHVAMWPEQSDKWPTAVRANGHLLLNSEKMSKSTGNFLTLTQAIDKFSADGMRLALADAGDTVEDANFVEAMADAGILRLYTWVEWVKEMVANWDSLRSGPASTFNDRVFASELNAGIIKTDQNYEKMMFKEALKTGFFEFQAAKDKYRELAVEGMHRELVFRFIEVQTLLLAPFCPHLCEHIWTLLGKPDSIMNASWPVAGPVNEVLIHSSQYLMEVTHDLRLRLKNYMMPAKGKKTDKQPLQKPSHCTIYVAKNYPPWQHTTLSVLRKHFEANNGKLPDNKVIASELGSMPELKKYMKKVMPFVAMIKENLEKMGPRILDLQLEFDEKAVLMENIVYLTNSLELEHIEVKFASEAEDKIREDCCPGKPLNVFRIEPGVSVSLVNPQPSNGHFSTKIEIRQGDNCDSIIRRLMKMNRGIKDLSKVKLMRFDDPLLGPRRVPVLGKEYTEKTPISEHAVFNVDLMSKKIHLTENGIRVDIGDTIIYLVH

SEQ ID NO: 610 - protein, 401 aa, Homo Sapiens
MSSSGAKDKPELQFPFLQDEDTVATLLECKTLFILRGLPGSGKSTLARVIVDKYRDGTKMVSADAYKITPGARGAFSEEYKRLDEDLAAYCRRRDIRILVLDDTNHERERLEQLFEMADQYQYQVVLVEPKTAWRLDCAQLKEKNQWQLSADDLKKLKPGLEKDFLPLYFGWFLTKKSSETLRKAGQVFLEELGNHKAFKKELRQFVPGDEPREKMDLVTYFGKRPPGVLHCTTKFCDYGKAPGAEEYAQQDVLKKSYSKAFTLTISALFVTPKTTGARVELSEQQLQLWPSDVDKLSPTDNLPRGSRAHITLGCAADVEAVQTGLDLLEILRQEKGGSRGEEVGELSRGKLYSLGNGRWMLTLAKNMEVRAIFTGYYGKGKPVPTQGSRKGGALQSCTII

SEQ ID NO: 611 - protein, 115 aa, Homo Sapiens [sequence omitted]

SEQ ID NO: 612 - protein, 504 aa, Homo Sapiens
MSLICSISNEVPEHPCVSPVSNHVYERRLIEKYIAENGTDPINNQPLSEEQLIDIKVAHPIRPKPPSATSIPAILKALQDEWDAVMLHSFTLRQQLQTTRQELSHALYQHDAACRVIARLTKEVTAAREALATLKPQAGLIVPQAVPSSQPSVVGAGEPMDLGELVGMTPEIIQKLQDKATVLTTERKKRGKTVPEELVKPEELSKYRQVASHVGLHSASIPGILALDLCPSDTNKILTGGADKNVVVFDKSSEQILATLKGHTKKVTSVVFHPSQDLVFSASPDATIRIWSVPNASCVQVVRAHESAVTGLSLHATGDYLLSSSDDQYWAFSDIQTGRVLTKVTDETSGCSLTCAQFHPDGLIFGTGTMDSQIKIWDLKERTNVANFPGHSGPITSIAFSENGYYLATAADDSSVKLWDLRKLKNFKTLQLDNNFEVKSLIFDQSGTYLALGGTDVQIYICKQWTEILHFTEHSGLTTGVAFGHHAKFIASTGMDRSLKFYSL

SEQ ID NO: 613 - protein, 418 aa, Homo Sapiens
MRSLLLLSAFCLLEAALAAEVKKPAAAAAPGTAEKLSPKAATLAERSAGLAFSLYQAMAKDQAVENILVSPVVVASSLGLVSLGGKATTASQAKAVLSAEQLRDEEVHAGLGELLRSLSNSTARNVTWKLGSRLYGPSSVSFADDFVRSSKQHYNCEHSKINFRDKRSALQSINEWAAQTTDGKLPEVTKDVERTDGALLVNAMFFKPHWDEKFHHKMVDNRGFMVTRSYTVGVMMMHRTGLYNYYDDEKEKLQIVEMPLAHKLSSLIILMPHHVEPLERLEKLLTKEQLKIWMGKMQKKAVAISLPKGVVEVTHDLQKHLAGLGLTEAIDKNKADLSRMSGKKDLYLASVFHATAFELDTDGNPFDQDIYGREELRSPKLFYADHPFIFLVRDTQSGSLLFIGRLVRPKGDKMRDEL

SEQ ID NO: 614 - protein, 952 aa, Homo Sapiens
MGVRHPPCSHRLLAVCALVSLATAALLGHILLHDFLLVPRELSGSSPVLEETHPAHQQGASRPGPRDAQAHPGRPRAVPTQCDVPPNSRFDCAPDKAITQEQCEARGCCYIPAKQGLQGAQMGQPWCFFPPSYPSYKLENLSSSEMGYTATLTRTTPTFFPKDILTLRLDVMMETENRLHFTIKDPANRRYEVPLETPHVHSRAPSPLYSVEFSEEPFGVIVRRQLDGRVLLNTTVAPLFFADQFLQLSTSLPSQYITGLAEHLSPLMLSTSWTRITLWNRDLAPTPGANLYGSHPFYLALEDGGSAHGVFLLNSNAMDVVLQPSPALSWRSTGGILDVYIFLGPEPKSVVQQYLDVVGYPFMPPYWGLGFHLCRWGYSSTAITRQVVENMTRAHFPLDVQWNDLDYMDSRRDFTFNKDGFRDFPAMVQELHQGGRRYMMIVDPAISSSGPAGSYRPYDEGLRRGVFITNETGQPLIGKVWPGSTAFPDFTNPTALAWWEDMVAEFHDQVPFDGMWIDMNEPSNFIRGSEDGCPNNELENPPYVPGVVGGTLQAATICASSHQFLSTHYNLHNLYGLTEAIASHRALVKARGTRPFVISRSTFAGHGRYAGHWTGDVWSSWEQLASSVPEILQFNLLGVPLVGADVCGFLGNTSEELCVRWTQLGAFYPFMRNHNSLLSLPQEPYSFSEPAQQAMRKALTLRYALLPHLYTLFHQAHVAGETVARPLFLEFPKDSSTWTVDHQLLWGEALLITPVLQAGKAEVTGYFPLGTWYDLQTVPVEALGSLPPPPAAPREPAIHSEGQWVTLPAPLDTINVHLRAGYIIPLQGPGLTTTESRQQPMALAVALTKGGEARGELFWDDGESLEVLERGAYTQVIFLARNNTIVNELVRVTSEGAGLQLQKVTVLGVATAPQQVLSNGVPVSNFTYSPDTKVLDICVSLLMGEQFLVSWC

SEQ ID NO: 615 - protein, 586 aa, Homo Sapiens
MPKPINVRVTTMDAELEFAIQPNTTGKQLFDQVVKTIGLREVWYFGLHYVDNKGFPTWLKLDKKVSAQEVRKENPLQFKFRAKFYPEDVAEELIQDITQKLFFLQVKEGILSDEIYCPPETAVLLGSYAVQAKFGDYNKEVHKSGYLSSERLIPQRVMDQHKLTRDQWEDRIQVWHAEHRGMLKDNAMLEYLKIAQDLEMYGINYFEIKNKKGTDLWLGVDALGLNIYEKDDKLTPKIGFPWSEIRNISFNDKKFVIKPIDKKAPDFVFYAPRLRINKRILQLCMGNHELYMRRRKPDTIEVQQMKAQAREEKHQKQLERQQLETEKKRRETVEREKEQMMREKEELMLRLQDYEEKTKKAERELSEQIQRALQLEEERKRAQEEAERLEADRMAALRAKEELERQAVDQIKSQEQLAAELAEYTAKIALLEEARRRKEDEVEEWQHRAKEAQDDLVKTKEELHLVMTAPPPPPPPVYEPVSYHVQESLQDEGAEPTGYSAELSSEGIRDDRNEEKRITEAEKNERVQRQLLTLSSELSQARDENKRTHNDIIHNENMRQGRDKYKTLRQIRQGNTKQRIDEFEAL

SEQ ID NO: 616 - protein, 311 aa, Homo Sapiens
MSNPSAPPPYEDRNPLYPGPPPPGGYGQPSVLPGGYPAYPGYPQPGYGHPAGYPQPMPPTHPMPMNYGPGHGYDGEERAVSDSFGPGEWDDRKVRHTFIRKVYSIISVQLLITVAIIAIFTFVEPVSAFVRRNVAVYYVSYAVFVVTYLILACCQGPRRRFPWNIILLTLFTFAMGFMTGTISSMYQTKAVIIAMIITAVVSISVTIFCFQTKVDFTSCTGLFCVLGIVLLVTGIVTSIVLYFQYVYWLHMLYAALGAICFTLFLAYDTQLVLGNRKHTISPEDYITGALQIYTDIIYIFTFVLQLMGDRN

SEQ ID NO: 617 - protein, 398 aa, Homo Sapiens
MELEEGKAGSGLRQYYLSKIEELQLIVNDKSQNLRRLQAQRNELNAKVRLLREELQLLQEQGSYVGEVVRAMDKKKVLVKVHPEGKFVVDVDKNIDINDVTPNCRVALRNDSYTLHKILPNKVDPLVSLMMVEKVPDSTYEMIGGLDKQIKEIKEVIELPVKHPELFEALGIAQPKGVLLYGPPGTGKTLLARAVAHHTDCTFIRVSGSELVQKFIGEGARMVRELFVMAREHAPSIIFMDEIDSIGSSRLEGGSGGDSEVQRTMLELLNQLDGFEATKNIKVIMATNRIDILDSALLRPGRIDRKIEFPPPNEEARLDILKIHSRKMNLTRGINLRKIAELMPGASGAEVKGVCTEAGMYALRERRVHVTQEDFEMAVAKVMQKDSEKNMSIKKLWK

SEQ ID NO: 618 - protein, 711 aa, Homo Sapiens [sequence omitted]

SEQ ID NO: 619 - protein, 254 aa, Homo Sapiens
MDNYADLSDTELTTLLRRYNIPHGPVVGSTRRLYEKKIFEYETQRRRLSPPSSSAASSYSFSDLNSTRGDADMYDLPKKEDALLYQSKGYNDDYYEESYFTTRTYGEPESAGPSRAVRQSVTSFPDADAFHHQVHDDDLLSSSEEECKDRERPMYGRDSAYQSITHYRPVSASRSSLDLSYYPTSSSTSFMSSSSSSSSWLTRRAIRPENRAPGAGLGQDRQVPLWGQLLLFLVFVIVLFFIYHFMQAEEGNPF

SEQ ID NO: 620 - protein, 1404 aa, Homo Sapiens
MAWKTLPIYLLLLLSVFVIQQVSSQDLSSCAGRCGEGYSRDATCNCDYNCQHYMECCPDFKRVCTAELSCKGRCFESFERGRECDCDAQCKKYDKCCPDYESFCAEVHNPTSPPSSKKAPPPSGASQTIKSTTKRSPKPPNKKKTKKVIESEEITEEHSVSENQESSSSSSSSSSSSTIRKIKSSKNSAANRELQKKLKVKDNKKNRTKKKPTPKPPVVDEAGSGLDNGDFKVTTPDTSTTQHNKVSTSPKITTAKPINPRPSLPPNSDTSKETSLTVNKETTVETKETTTTNKQTSTDGKEKTTSAKETQSIEKTSAKDLAPTSKVLAKPTPKAETTTKGPALTTPKEPTPTTPKEPASTTPKEPTPTTIKSAPTTPKEPAPTTTKSAPTTPKEPAPTTTKEPAPTTPKEPAPTTTKEPAPTTTKSAPTTPKEPAPTTPKKPAPTTPKEPAPTTPKEPTPTTPKEPAPTTKEPAPTTPKEPAPTAPKKPAPTTPKEPAPTTPKEPAPTTTKEPSPTTPKEPAPTTTKSAPTTTKEPAPTTTKSAPTTPKEPSPTTTKEPAPTTPKEPAPTTPKKPAPTTPKEPAPTTPKEPAPTTTKKPAPTTPKEPAPTTPKETAPTTPKKLTPTTPEKLAPTTPEKPAPTTPEELAPTTPEEPTPTTPEEPAPTTPKAAAPNTPKEPAPTTPKEPAPTTPKEPAPTTPKETAPTTPKGTAPTTLKEPAPTTPKKPAPKELAPTTTKEPTSTTCDKPAPTTPKGTAPTTPKEPAPTTPKEPAPTTPKGTAPTTLKEPAPTTPKKPAPKELAPTTTKGPTSTTSDKPAPTTPKETAPTTPKEPAPTTPKKPAPTTPETPPPTTSEVSTPTTTKEPTTIHKSPDESTPELSAEPTPKALENSPKEPGVPTTKTPAATKPEMTTTAKDKTTERDLRTTPETTTAAPKMTKETATTTEKTTESKITATTTQVTSTTTQDTTPFKITTLKTTTLAPKVTTTKKTITTTEIMNKPEETAKPKDRATNSKATTPKPQKPTKAPKKPTSTKKPKTMPRVRKPKTTPTPRKMTSTMPELNPTSRIAEAMLQTTTRPNQTPNSKLVEVNPKSEDAGGAEGETPHMLLRPHVFMPEVTPDMDYLPRVPNQGIIINPMLSDETNICNGKPVDGLTTLRNGTLVAFRGHYFWMLSPFSPPSPARRITEVWGIPSPIDTVFTRCNCEGKTFFFKDSQYWRFTNDIKDAGYPKPIFKGFGGLTGQIVAALSTAKYKNWPESVYFFKRGGSIQQYIYKQEPVQKCPGRRPALNYPVYGETTQVRRRRFERAIGPSQTHTIRIQYSPARLAYQDKGVLHNEVKVSILWRGLPNVVTSAISLPNIRKPDGYDYYAFSKDQYYNIDVPSRTARAITTRSGQTLSKVWYNCP

SEQ ID NO: 621 - protein, 548 aa, Homo Sapiens
MAKFMTPVIQDNPSGWGPCAVPEQFRDMPYQPFSKGDRLGKVADWTGATYQDKRYTNKYSSQFGGGSQYAYFHEEDESSFQLVDTARTQKTAYQRNRMRFAQRNLRRDKDRRNMLQFNLQILPKSAKQKERERIRLQKKFQKQFGVRQKWDQKSQKPRDSSVEVRSDWEVKEEMDFPQLMKMRYLEVSEPQDIECCGALEYYDKAFDRITTRSEKPLRSIKRIFHTVTTTDDPVIRKLAKTQGNVFATDAILATLMSCTRSVYSWDIVVQRVGSKLFFDKRDNSDFDLLTVSETANEPPQDEGNSFNSPRNLAMEATYINHNFSQQCLRMGKERYNFPNPNPFVEDDMDKNEIASVAYRYRRWKLGDDIDLIVRCEHDGVMTGANGEVSFINIKTLNEWDSRHCNGVDWRQKLDSQRGAVIATELKNNSYKLARWTCCALLAGSEYLKLGYVSRYHVKDSSRHVILGTQQFKPNEFASQINLSVENAWGILRCVIDICMKLEEGKYLILKDPNKQVIRVYSLPDGTFSSDEDEEEEEEEEEEEEEEET

SEQ ID NO: 622 - protein, 1099 aa, Homo Sapiens [sequence omitted]

SEQ ID NO: 623 - protein, 534 aa, Homo Sapiens
MATALMAVVLRAAAVAPRLRGRGGTGGARRLSCGARRRAARGTSPGRRLSTAWSQPQPPPEEYAGADDVSQSPVAEEPSWVPSPRPPVPHESPEPPSGRSLVQRDIQAFLNQCGASPGEARHWLTQFQTCHHSADKPFAVIEVDEEVLKCQQGVSSLAFALAFLQRMDMKPLVVLGLPAPTAPSGCLSFWEAKAQLAKSCKVLVDALRHNAAAAVPFFGGGSVLRAAEPAPHASYGGIVSVETDLLQWCLESGSIPILCPIGETAARRSVLLDSLEVTASLAKALRPTKIIFLNNTGGLRDSSHKVLSNVNLPADLDLVCNAEWVSTKERQQMRLIVDVLSRLPHHSSAVITAASTLLTELFSNKGSGTLFKNAERMLRVRSLDKLDQGRLVDLVNASFGKKLRDDYLASLRPRLHSIYVSEGYNAAAILTMEPVLGGTPYLDKFVVSSSRQGQGSGQMLWECLRRDLQTLFWRSRVTNPINPWYFKHSDGSFSNKQWIFFWFGLADIRDSYELVNHAKGLPDSFHKPASDPGS

SEQ ID NO: 624 - protein, 910 aa, Homo Sapiens [sequence omitted]

SEQ ID NO: 625 - protein, 1609 aa, Homo Sapiens
MRGSHRAAPALRPRGRLWPVLAVLAAAAAAGCAQAAMDECTDEGGRPQRCMPEFVNAAFNVTVVATNTCGTPPEEYCVQTGVTGVTKSCHLCDAGQPHLQHGAAFLTDYNNQADTTWWQSQTMLAGVQYPSSINLTLHLGKAFDITYVRLKFHTSRPESFAIYKRTREDGPWIPYQYYSGSCENTYSKANRGFIRTGGDEQQALCTDEFSDISPLTGGNVAFSTLEGRPSAYNFDNSPVLQEWVTATDIRVTLNRLNTFGDEVFNDPKVLKSYYYAISDFAVGGRCKCNGHASECMKNEFDKLVCNCKHNTYGVDCEKCLPFFNDRPWRRATAESASECLPCDCNGRSQECYFDPELYRSTGHGGHCTNCQDNTDGAHCERCRENFFRLGNNEACSSCHCSPVGSLSTQCDSYGRCSCKPGVMGDKCDRCQPGFHSLTEAGCRPCSCDPSGSIDECNIETGRCVCKDNVEGFNCERCKPGFFNLESSNPRGCTPCFCFGHSSVCTNAVGYSVYSISSTFQIDEDGWRAEQRDGSEASLEWSSERQDIAVISDSYFPRYFIAPAKFLGKQVLSYGQNLSFSFRVDRRDTRLSAEDLVLEGAGLRVSVPLIAQGNSYPSETTVKYVFRLHEATDYPWRPALTPFEFQKLLNNLTSIKIRGTYSERSAGYLDDVTLASARPGPGVPATWVESCTCPVGYGGQFCEMCLSGYRRETPNLGPYSPCVLCACNGHSETCDPETGVCNCRDNTAGPHCEKCSDGYYGDSTAGTSSDCQPCPCPGGSSCAVVPKTKEVVCTNCPTGTTGKRCELCDDGYFGDPLGRNGPVRLCRLCQCSDNIDPNAVGNCNRLTGECLKCIYNTAGFYCDRCKDGFFGNPLAPNPADKCKACNCNLYGTMKQQSSCNPVTGQCECLPHVTGQDCGACDPGFYNLQSGQGCERCDCHALGSTNGQCDIRTGQCECQPGITGQHCERCEVNHFGFGPEGCKPCDCHPEGSLSLQCKDDGRCECREGFVGNRCDQCEENYFYNRSWPGCQECPACYRLVKDKVADHRVKLQELESLIANLGTGDEMVTDQAFEDRLKEAEREVMDLLREAQDVKDVDQNLMDRLQRVNNTLSSQISRLQNIRNTIEETGNLAEQARAHVENTERLIEIASRELEKAKVAAANVSVTQPESTGDPNNMTLLAEEARKLAERHKQEADDIVRVAKTANDTSTEAYNLLLRTLAGENQTAFEIEELNRKYEQAKNISQDLEKQAARVHEEAKRAGDKAVEIYASVAQLSPLDSETLENEANNIKMEAENLEQLIDQKLKDYEDLREDMRGKELEVKNLLEKGKTEQQTADQLLARADAAKALAEEAAKKGRDTLQEANDILNNLKDFDRRVNDNKTAAEEALRKIPAINQTITEANEKTREAQQALGSAAADATEAKNKAHEAERIASAVQKNATSTKAEAERTFAEVTDLDNEVNNMLKQLQEAEKELKRKQDDADQDMMMAGMASQAAQEAEINARKAKNSVTSLLSIINDLLEQLGQLDTVDLNKLNEIEGTLNKAKDEMKVSDLDRKVSDLENEAKKQEAAIMDYNRDIEEIMKDIRNLEDIRKTLPSGCFNTPSIEKP

SEQ ID NO: 626 - protein, 734 aa, Homo Sapiens
MSGFDDPGIFYSDSFGGDAQADEGQARKSQLQRRFKEFLRQYRVGTDRTGFTFKYRDELKRHYNLGEYWIEVEMEDLASFDEDLADYLYKQPAEHLQLLEEAAKEVADEVTRPRPSGEEVLQDIQVMLKSDASPSSIRSLKSDMMSHLVKIPGIIIAASAVRAKATRISIQCRSCRNTLTNIAMRPGLEGYALPRKCNTDQAGRPKCPLDPYFIMPDKCKCVDFQTLKLQELPDAVPHGEMPRHMQLYCDRYLCDKVVPGNRVTIMGIYSIKKFGLTTSRGRDRVGVGIRSSYIRVLGIQVDTDGSGRSFAGAVSPQEEEEFRRLAALPNVYEVISKSIAPSIFGGTDMKKAIACLLFGGSRKRLPDGLTRRGDINLLMLGDPGTAKSQLLKFVEKCSPIGVYTSGKGSSAAGLTASVMRDPSSRNFIMEGGAMVLADGGVVCIDEFDKMREDDRVAIHEAMEQQTISIAKAGITTTLNSRCSVLAAANSVFGRWDETKGEDNIDFMPTILSRFDMIFIVKDEHNEERDVMLAKHVITLHVSALTQTQAVEGEIDLAKLKKFIAYCRVKCGPRLSAEAAEKLKNRYIIMRSGARQHERDSDRRSSIPITVRQLEAIVRIAEALSKMKLQPFATEADVEEALRLFQVSTLDAALSGTLSGVEGFTSQEDQEMLSRIEKQLKRRFAIGSQVSEHSIIKDFTKQKYPEHAIHKVLQLMLRRGEIQHRMQRKVLYRLK

SEQ ID NO: 627 - protein, 445 aa, Homo Sapiens
MAVAIAAARVWRLNRGLSQAALLLLRQPGARGLARSHPPRQQQQFSSLDDKPQFPGASAEFIDKLEFIQPNVISGIPIYRVMDRQGQIINPSEDPHLPKEKVLKLYKSMTLLNTMDRILYESQRQGRISFYMTNYGEEGTHVGSAAALDNTDLVFGQYREAGVLMYRDYPLELFMAQCYGNISDLGKGRQMPVHYGCKERHFVTISSPLATQIPQAVGAAYAAKRANANRVVICYFGEGAASEGDAHAGFNFAATLECPIIFFCRNNGYAISTPTSEQYRGDGIAARGPGYGIMSIRVDGNDVFAVYNATKEARRRAVAENQPFLIEAMTYRIGHHSTSDDSSAYRSVDEVNYWDKQDHPISRLRHYLLSQGWWDEEQEKAWRKQSRRKVMEAFEQAERKPKPNPNLLFSDVYQEMPAQLRKQQESLARHLQTYGEHYPLDHFDK

SEQ ID NO: 628 - protein, 283 aa, Homo Sapiens
MADRGPWRVGVVGYGRLGQSLVSRLLAQGPELGLELVFVWNRDPGRMAGSVPPSLQLQNLAALGERRPDLVVEVAHPKIIHESGAQILRHANLLVGSPSALSDQTTERQLLEASQHWDHAVFVARGALWGAEDIRRLDAAGGLRSLRVTMATHPDGFRLEGPLAAAHSPGPCTVLYEGPVRGLCPFAPRNSNTMAAAALAAPSLGFDGVIGVLVADTSLTDMHVVDVELSGPRGPTGRSFAVHTRRENPAEPGAVTGSATVTAFWQSLLACCQLPSRPGIHLC

SEQ ID NO: 629 - protein, 403 aa, Homo Sapiens
MEPVGCCGECRGSSVDPRSTFVLSNLAEVVERVLTFLPAKALLRVACVCRLWRECVRRVLRTHRSVTWISAGLAEAGHLEGHCLVRVVAEELENVRILPHTVLYMADSETFISLEECRGHKRARKRTSMETALALEKLFPKQCQVLGIVTPGIVVTPMGSGSNRPQEIEIGESGFALLFPQIEGIKIQPFHFIKDPKNLTLERHQLTEVGLLDNPELRVVLVFGYNCCKVGASNYLQQVVSTFSDMNIILAGGQVDNLSSLTSEKNPLDIDASGVVGLSFSGHRIQSATVLLNEDVSDEKTAEAAMQRLKAANIPEHNTIGFMFACVGRGFQYYRAKGNVEADAFRKFFPSVPLFGFFGNGEIGCDRIVTGNFILRKCNEVKDDDLFHSYTTIMALIHLGSSK

SEQ ID NO: 630 - protein, 297 aa, Homo Sapiens
MAKVSELYDVTWEEMRDKMRKWREENSRNSEQIVEVGEELINEYASKLGDDIWIIYEQVMIAALDYGRDDLALFCLQELRRQFPGSHRVKRLTGMRFEAMERYDDAIQLYDRILQEDPTNTAARKRKIAIRKAQGKNVEAIRELNEYLEQFVGDQEAWHELAELYINEHDYAKAAFCLEELMMTNPHNHLYCQQYAEVKYTQGGLENLELSRKYFAQALKLNNRNMRALFGLYMSASHIASNPKASAKTKKDNMKYASWAASQINRAYQFAGRSKKETKYSLKAVEDMLETLQITQS

SEQ ID NO: 631 - protein, 723 aa, Homo Sapiens
MFEEKASSPSGKMGGEEKPIGAGEEKQKEGGKKKNKEGSGDGGRAELNPWPEYIYTRLEMYNILKAEHDSILAEKAEKDSKPIKVTLPDGKQVDAESWKTTPYQIACGISQGLADNTVIAKVNNVVWDLDRPLEEDCTLELLKFEDEEAQAVYWHSSAHIMGEAMERVYGGCLCYGPPIENGFYYDMYLEEGGVSSNDFSSLEALCKKIIKEKQAFERLEVKKETLLAMFKYNKFKCRILNEKVNTPTTTVYRCGPLIDLCRGPHVRHTGKIKALKIHKNSSTYWEGKADMETLQRIYGISFPDPKMLKEWEKFQEEAKNRDHRKIGRDQELYFFHELSPGSCFFLPKGAYIYNALIEFIRSEYRKRGFQEVVTPNIFNSRLWMTSGHWQHYSENMFSFEVEKELFALKPMNCPGHCLMFDHRPRSWRELPLRLADFGVLHRNELSGALTGLTRVRRFQQDDAHIFCAMEQIEDEIKGCLDFLRTVYSVFGFSFKLNLSTRPEKFLGDIEVWDQAEKQLENSLNEFGEKWELNSGDGAFYGPKIDIQIKDAIGRYHQCATIQLDFQLPIRFNLTYVSHDGDDKKRPVIVHRAILGSVERMIAILTENYGGKWPFWLSPRQVMVVPVGPTCDEYAQKVRQQFHDAKFMADIDLDPGCTLNKKIRNAQLAQYNFILVVGEKEKISGTVNIRTRDNKVHGERTISETIERLQQLKEFRSKQAEEEF

SEQ ID NO: 632 - protein, 723 aa, Homo Sapiens; identical to SEQ ID NO: 631

SEQ ID NO: 633 - protein, 383 aa, Homo Sapiens
MGVKASQTGFVVLVLLQCCSAYKLVCYYTSWSQYREGDGSCFPDALDRFLCTHIIYSFANISNDHIDTWEWNDVTLYGMLNTLKNRNPNLKTLLSVGGWNFGSQRFSKIASNTQSRRTFIKSVPPFLRTHGFDGLDLAWLYPGRRDKQHFTTLIKEMKAEFIKEAQPGKKQLLLSAALSAGKVTIDSSYDIAKISQHLDFISIMTYDFHGAWRGTTGHHSPLFRGQEDASPDRFSNTDYAVGYMLRLGAPASKLVMGIPTFGRSFTLASSETGVGAPISGPGIPGRFTKEAGTLAYYEICDFLRGATVHRILGQQVPYATKGNQWVGYDDQESVKSKVQYLKDRQLAGAMVWALDLDDFQGSFCGQDLRFPLTNAIKDALAAT

SEQ ID NO: 634 - protein, 561 aa, Homo Sapiens
MAEQVALSRTQVCGILREELFQGDAFHQSDTHIFIIMGASGDLAKKKIYPTIWWLFRDGLLPENTFIVGYARSRLTVADIRKQSEPFFKATPEEKLKLEDFFARNSYVAGQYDDAASYQRLNSHMNALHLGSQANRLFYLALPPTVYEAVTKNIHESCMSQIGWNRIIVEKPFGRDLQSSDRLSNHISSLFREDQIYRIDHYLGKEMVQNLMVLRFANRIFGPIWNRDNIACVILTFKEPFGTEGRGGYFDEFGIIRGPGRQGGSGSESCSLSLGSLVWGPHALEPGEQGGELRRALASSVPRDVMQNHLLQMLCLVAMEKPASTNSDDVRDEKVKVLKCISEVQANNVVLGQYVGNPDGEGEATKGYLDDPTVPRGSTTATFAAVVLYVENERWDGVPFILRCGKALNERKAEVRLQFHDVAGDIFHQQCKRNELVIRVQPNEAVYTKMMTKKPGMFFNPEESELDLTYGNRYKNVKLPDAYERLILDVFCGSQMHFVRSDELREAWRIFTPLLHQIELEKPKPIPYIYGSRGPTEADELMKRVGFQYEGTYKWVNPHKL

SEQ ID NO: 635 - protein, 150 aa, Homo Sapiens
MAGILFEDIFDVKDIDPEGKKFDRVSRLHCESESFKMDLILDVNIQIYPVDLGDKFRLVIASTLYEDGTLDDGEYNPTDDRPSRADQFEYVMYGKVYRIEGDETSTEAATRLSAYVSYGGLLMRLQGDANNLHGFEVDSRVYLLMKKLAF

SEQ ID NO: 636 - protein, 613 aa, Homo Sapiens
MSQPGIPASGGAPASLQAQNGAALASGSPYTNGPVQNALLSSQESVSQGYNFQLPGSYPHPIPAKTLNPVSGQSNYGGSQGSGQTLNRPPVASNPVTPSLHSGPAPRMPLPASQNPATTPMPSSSFLPEANLPPPLNWQYNYPSTASQTNHCPRASSQPTVSGNTSLTTNHQYVSSGYPSLQNSFIKSGPSVPPLVNPPLPTTFQPGAPHGPPPAGGPPPVRALTPLTSSYRDVPQPLFNSAVNQEGITSNTNNGSMVVHSSYDEIEGGGLLATPQLTNKNPKMSRSVGYSYPSLPPGYQNTTPPGATGVPPSSLNYPSGPQAFTQTPLGANHLTTSMSGLSLQPEGLRVVNLLQERNMLPSTPLKPPVPNLHEDIQKLNCNPELFRCTLTSIPQTQALLNKAKLPLGLLLHPFKDLVQLPVVTSSTIVRCRSCRTYINPFVSFLDQRRWKCNLCYRVNDVPEEFLYNPLTRVYGEPHRRPEVQNATIEFMAPSEYMLRPPQPPVYLFVFDVSHNAVETGYLNSVCQSLLDNLDLLPGNTRTKIGFITFDSTIHFYGLQESLSQPQMLIVSDIEDVFIPMPENLLVNLNESKESVIGVSSEETLITCLEIAMR

SEQ ID NO: 637 - protein, 647 aa, Homo Sapiens
MAAILGDTIMVAKGLVKLTQAAVETHLQHLGIGGELIMAARALQSTAVEQIGMFLGKVQGQDKHEEYFAENFGGPEGEFHFSVPHAAGASTDFSSASAPDQSAPPSLGHAHSEGPAPAYVASGPFREAGFPGQASSPLGRANGRLFANPRDSFSAMGFQRRFFHQDQSPVGGLTAEDIEKARQAKARPENKQHKQTLSEHARERKVPVTRIGRLANFGGLAVGLGFGALAEVAKKSLRSEDPSGKKAVLGSSPFLSEANAERIVRTLCKVRGAALKLGQMLSIQDDAFINPHLAKIFERVRQSADFMPLKQMMKTLNNDLGPNWRDKLEYFEERPFAAASIGQVHLARMKGGREVAMKIQYPGVAQSINSDVNNLMAVLNMSNMLPEGLFPEHLIDVLRRELALECDYQREAACARKFRDLLKGHPFFYVPEIVDELCSPHVLTTELVSGFPLDQAEGLSQEIRNEICYNILVLCLRELFEFHFMQTDPNWSNFFYDPQQHKVALLDFGATREYDRSFTDLYIQIIRAAADRDRETVRAKSIEMKFLTGYEVKVMEDAHLDAILILGEAFASDEPFDFGTQSTTEKIHNLIPVMLRHRLVPPPEETYSLHRKMGGSFLICSKLKARFPCKAMFEEAYSNYCKRQAQQ

SEQ ID NO: 638 - protein, 2035 aa, Homo Sapiens
MASAVSPANLPAVLLQPRWKRVVGWSGPVPRPRHGHRAVAIKELIVVFGGGNEGIVDELHVYNTATNQWFIPAVRGDIPPGCAAYGFVCDGTRLLVFGGMVEYGKYSNDLYELQASRWEWKRLKAKTPKNGPPPCPRLGHSFSLVGNKCYLFGGLANDSEDPKNNIPRYLNDLYILELRPGSGVVAWDIPITYGVLPPPRESHTAVVYTEKDNKKSKLVIYGGMSGCRLGDLWTLDIDTLTWNKPSLSGVAPLPRSLHSATTIGNKMYVFGGWVPLVMDDVKVATHEKEWKCTNTLACLNLDTMAWETILMDTLEDNIPRARAGHCAVAINTRLYIWSGRDGYRKAWNNQVCCKDLWYLETEKPPPPARVQLVRANTNSLEVSWGAVATADSYLLQLQKYDIPATAATATSPTPNPVPSVPANPPKSPAPAAAAPAVQPLTQVGITLLPQAAPAPPTTTTIQVLPTVPGSSISVPTAARTQGVPAVLKVTGPQATTGTPLVTMRPASQAGKAPVTVTSLPAGVRMVVPTQSAQGTVIGSSPQMSGMAALAAAAAATQKIPPSSAPTVLSVPAGTTIVKTMAVTPGTTTLPATVKVASSPVMVSNPATRMLKTAAAQVGTSVSSATNTSTRPIITVHKSGTVTVAQQAQVVTTVVGGVTKTITLVKSPISVPGGSALISNLGKVMSVVQTKPVQTSAVTGQASTGPVTQIIQTKGPLPAGTILKLVTSADGKPTTIITTTQASGAGTKPTILGISSVSPSTTKPGTTTIIKTIPMSAIITQAGATGVTSSPGIKSPITIITTKVMTSGTGAPAKIITAVPKIATGHGQQGVTQVVLKGAPGQPGTILRTVPMGGVRLVTPVTVSAVKPAVTTLVVKGTTGVTTLGTVTGTVSTSLAGAGGHSTSASLATPITTLGTIATLSSQVINPTAITVSAAQTTLTAAGGLTTPTITMQPVSQPTQVTLITAPSGVEAQPVHDLPVSILASPTTEQPTATVTIADSGQGDVQPGTVTLVCSNPPCETHETGTTNTATTTVVANLGGHPQPTQVQFVCDRQEAAASLVTSTVGQQNGSVVRVCSNPPCETHETGTTNTATTATSNMAGQHGCSNPPCETHETGTTNTATTAMSSVGANHQRDARRACAAGTPAVIRISVATGALEAAQGSKSQCQTRQTSATSTTMTVMATGAPCSAGPLLGPSMAREPGGRSPAFVQLAPLSSKVRLSSPSIKDLPAGRHSHAVSTAAMTRSSVGAGEPRMAPVCESLQGGSPSTTVTVTALEALLCPSATVTQVCSNPPCETHETGTTNTATTSNAGSAQRVCSNPPCETHETGTTHTATTATSNGGTGQPEGGQQPPAGRPCETHQTTSTGTTMSVSVGALLPDATSSHRTVESGLEVAAAPSVTPQAGTALLAPFPTQRVCSNPPCETHETGTTHTATTVTSNMSSNQDPPPAASDQGEVESTQGDSVNITSSSAITTTVSSTLTRAVTTVTQSTPVPGPSVPPPEELQVSPGPRQQLPPRQLLQSASTALMGESAEVLSASQTPELPAAVDLSSTGEPSSGQESAGSAVVATVVVQPPPPTQSEVDQLSLPQELMAEAQAGTTTLMVTGLTPEELAVTAAAEAAAQAAATEEAQALAIQAVLQAAQQAVMGTGEPMDTSEAAATVTQAELGHLSAEGQEGQATTIPIVLTQQELAALVQQQQLQEAQAQQQHHHLPTEALAPADSLNDPAIESNCLNELAGTVPSTVALLPSTATESLAPSNTFVAPQPVVVASPAKLQAAATLTEVANGIESLGVKPDLPPPPSKAPMKKENQWFDVGVIKGTNVMVTHYFLPPDDAVPSDDDLGTVPDYNQLKKQELQPGTAYKFRVAGINACGRGPFSEISAFKTCLPGFPGAPCAIKISKSPDGAHLTWEPPSVTSGKIIEYSVYLAIQSSQAGGELKSSTPAQLAFMRVYCGPSPSCLVQSSSLSNAHIDYTTKPAIIFRIAARNEKGYGPATQVRWLQETSKDSSGTKPANKRPMSSPEMKSAPKKSKADGQ

SEQ ID NO: 639 - protein, 540 aa, Homo Sapiens
MKFLIFAFFGGVHLLSLCSGKAICKNGISKRTFEEIKEEIASCGDVAKAIINLAVYGKAQNRSYERLALLVDTVGPRLSGSKNLEKAIQIMYQNLQQDGLEKVHLEPVRIPHWERGEESAVMLEPRIHKIAILGLGSSIGTPPEGITAEVLVVTSFDELQRRASEARGKIVVYNQPYINYSRTVQYRTQGAVEAAKVGALASLIRSVASFSIYSPHTGIQEYQDGVPKIPTACITVEDAEMMSRMASHGIKIVIQLKMGAKTYPDTDSFNTVAEITGSKYPEQVVLVSGHLDSWDVGQGAMDDGGGAFISWEALSLIKDLGLRPKRTLRLVLWTAEEQGGVGAFQYYQLHKVNISNYSLVMESDAGTFLPTGLQFTGSEKARAIMEEVMSLLQPLNITQVLSHGEGTDINFWIQAGVPGASLLDDLYKYFFFHHSHGDTMTVMDPKQMLLLLFGLLFLMLLQTWKKCCLGPRNSKKETFSCFWPGILGLQLWKTPLHITISSNSSSKHNSISCFLLLSFLILSKFSDSRKRNHSPLPPTT

SEQ ID NO: 640 - protein, 286 aa, Homo Sapiens
MSAPLDAALHALQEEQARLKMRLWDLQQLRKELGDSPKDKVPFSVPKIPLVFRGHTQQDPEVPKSLVSNLRIHCPLLAGSALITFDDPKVAEQVLQQKEHTINMEECRLRVQVQPLELPMVTTIQMSSQLSGRRVLVTGFPASLRLSEEELLDKLEIFFGKTRNGGGDVDVRELLPGSVMLGFARDGVAQRLCQIGQFTVPLGGQQVPLRVSPYVNGEIQKAEIRSQPVPRSVLVLNIPDILDGPELHDVLEIHFQKPTRGGGEVEALTVVPQGQQGLAVFTSESG

SEQ ID NO: 641 - protein, 305 aa, Homo Sapiens
MAPLDLDKYVEIARLCKYLPENDLKRLCDYVCDLLLEESNVQPVSTPVTVCGDIHGQFYDLCELFRTGGQVPDTNYIFMGDFVDRGYYSLETFTYLLALKAKWPDRITLLRGNHESRQITQVYGFYDECQTKYGNANAWRYCTKVFDMLTVAALIDEQILCVHGGLSPDIKTLDQIRTIERNQEIPHKGAFCDLVWSDPEDVDTWAISPRGAGWLFGAKVTNEFVHINNLKLICRAHQLVHEGYKFMFDEKLVTVWSAPNYCYRCGNIASIMVFKDVNTREPKLFRAVPDSERVIPPRTTTPYFL

SEQ ID NO: 642 - protein, 640 aa, Homo Sapiens
MALSRGLPRELAEAVAGGRVLVVGAGGIGCELLKNLVLTGFSHIDLIDLDTIDVSNLNRQFLFQKKHVGRSKAQVAKESVLQFYPKANIVAYHDSIMNPDYNVEFFRQFILVMNALDNRAARNHVNRMCLAADVPLIESGTAGYLGQVTTIKKGVTECYECHPKPTQRTFPGCTIRNTPSEPIHCIVWAKYLFNQLFGEEDADQEVSPDRADPEAAWEPTEAEARARASNEDGDIKRISTKEWAKSTGYDPVKLFTKLFKDDIRYLLTMDKLWRKRKPPVPLDWAEVQSQGEETNASDQQNEPQLGLKDQQVLDVKSYARLFSKSIETLRVHLAEKGDGAELIWDKDDPSAMDFVTSAANLRMHIFSMNMKSRFDIKSMAGNIIPAIATTNAVIAGLIVLEGLKILSGKIDQCRTIFLNKQPNPRKKLLVPCALDPPNPNCYVCASKPEVTVRLNVHKVTVLTLQDKIVKEKFAMVAPDVQIEDGKGTILISSEEGETEANNHKKLSEFGIRNGSRLQADDFLQDYTLLINILHSEDLGKDVEFEVVGDAPEKVGPKQAEDAAKSITNGSDDGAQPSTSTAQEQDDVLIVDSDEEDSSNNADVSEEERSRKRKLDEKENLSAKRSRIEQKEELDDVIALD

SEQ ID NO: 643 - protein, 323 aa, Homo Sapiens
MKETDLIIMDLRQFLMCLSLCTAFALSKPTEKKDRVHHEPQLSDKVHNDAQSFDYDHDAFLGAEEAKTFDQLTPEESKERLGKIVSKIDGDKDGFVTVDELKDWIKFAQKRWIYEDVERQWKGHDLNEDGLVSWEEYKNATYGYVLDDPDPDDGFNYKQMMVRDERRFKMADKDGDLIATKEEFTAFLHPEEYDYMKDIVVQETMEDIDKNADGFIDLEEYIGDMYSHDGNTDEPEWVKTEREQFVEFRDKNRDGKMDKEETKDWILPSDYDHAEAEARHLVYESDQNKDGKLTKEEIVDKYDLFVGSQATDFGEALVRHDEF

SEQ ID NO: 644 - protein, 1071 aa, Homo Sapiens
MPAIMTMLADHAARQLLDFSQKLDINLLDNVVNCLYHGEGAQQRMAQEVLTHLKEHPDAWTRVDTILEFSQNMNTKYYGLQILENVIKTRWKILPRNQCEGIKKYVVGLIIKTSSDPTCVEKEKVYIGKLNMILVQILKQEWPKHWPTFISDIVGASRTSESLCQNNMVILKLLSEEVFDFSSGQITQVKSKHLKDSMCNEFSQIFQLCQFVMENSQNAPLVHATLETLLRFLNWIPLGYIFETKLISTLIYKFLNVPMFRNVSLKCLTEIAGVSVSQYEEQFVTLFTLTMMQLKQMLPLNTNIRLAYSNGKDDEQNFIQNLSLFLCTFLKEHDQLIEKRLNLRETLMEALHYMLLVSEVEETEIFKICLEYWNHLAAELYRESPFSTSASPLLSGSQHFDVPPRRQLYLPMLFKVRLLMVSRMAKPEEVLVVENDQGEVVREFMKDTDSINLYKNMRETLVYLTHLDYVDTERIMTEKLHNQVNGTEWSWKNLNTLCWAIGSISGAMHEEDEKRFLVTVIKDLLGLCEQKRGKDNKAIIASNIMYIVGQYPRFLRAHWKFLKTVVNKLFEFMHETHDGVQDMACDTFIKIAQKCRRHFVQVQVGEVMPFIDEILNNINTIICDLQPQQVHTFYEAVGYMIGAQTDQTVQEHLIEKYMLLPNQVWDSIIQQATKNVDILKDPETVKQLGSILKTNVRACKAVGHPFVIQLGRIYLDMLNVYKCLSENISAAIQANGEMVTKQPLIRSMRTVKRETLKLISGWVSRSNDPQMVAENFVPPLLDAVLIDYQRNVPAAREPEVLSTMAIIVNKLGGHITAEIPQIFDAVFECTLNMINKDFEEYPEHRTNFFLLLQAVNSHCFPAFLAIPPTQFKLVLDSIIWAFKHTMRNVADTGLQILFTLLQNVAQEEAAAQSFYQTYFCDILQHIFSVVTDTSHTAGLTMHASILAYMFNLVEEGKISTSLNPGNPVNNQIFLQEYVANLLKSAFPHLQDAQVKLFVTGLFSLNQDIPAFKEHLRDFLVQIKEFAGEDTSDLFLEEREIALRQADEEKHKRQMSVPGIFNPHEIPEEMCD

SEQ ID NO: 645 - protein, 190 aa, Homo Sapiens
MAGSRLETVGSIFSRTRDLVRAGVLKEKPLWFDVYDAFPPLREPVFQRPRVRYGKAKAPIQDIWYHEDRIRAKFYSVYGSGQRAFDLFNPNFKSTCQRFVEKYTELQKLGETDEEKLFVETGKALLAEGVILRRVGEARTQHGGSHVSRKSEHLSVRPQTALEENETQKEVPQDQHLEAPADQSKGLLPP

SEQ ID NO: 646 - protein, 853 aa, Homo Sapiens
MLPRSPPLPRGNLWWREEFGSFRAGVESSWEPPRDFGGGSSLAAGMAGTVVLDDVELREAQRDYLDFLDDEEDQGIYQSKVRELISDNQYRLIVNVNDLRRKNEKRANRLLNNAFEELVAFQRALKDFVASIDATYAKQYEEFYVGLEGSFGSKHVSPRTLTSCFLSCVVCVEGIVTKCSLVRPKVVRSVHYCPATKKTIERRYSDLTTLVAFPSSSVYPTKDEENNPLETEYGLSVYKDHQTITIQEMPEKAPAGQLPRSVDVILDDDLVDKAKPGDRVQVVGTYRCLPGKKGGYTSGTFRTVLIACNVKQMSKDAQPSFSAEDIAKIKKFSKTRSKDIFDQLAKSLAPSIHGHDYVKKAILCLLLGGVERDLENGSHIRGDINILLIGDPSVAKSQLLRYVLCTAPRAIPTTGRGSSGVGLTAAVTTDQETGERRLEAGAMVLADRGVVCIDEFDKMSDMDRTAIHEVMEQGRVTIAKAGIHARLNARCSVLAAANPVYGRYDQYKTPMENIGLQDSLLSRFDLLFIMLDQMDPEQDREISDHVLRMHRYRAPGEQDGDAMPLGSAVDILATDDPNFSQEDQQDTQIYEKHDNLLHGTKKKKEKMVSAAFMKKYIHVAKIIKPVLTQESATYIAEEYSRLRSQDSMSSDTARTSPVTARTLETLIRLATAHAKARMSKTVDLQDAEEAVELVQYAYFKKVLEKEKKRKKRSEDESETEDEEEKSQEDQEQKRKRRKTRQPDAKDGDSYDPYDFSDTEEEMPQVHTPKTADSQETKESQKVELSESRLKAFKVALLDVFREAHAQSIGMNRLTESINRDSEEPFSSVEIQAALSKMQDDNQVMVSEGIIFLI

SEQ ID NO: 647 - protein, 912 aa, Homo Sapiens [sequence omitted]

SEQ ID NO: 648 - protein, 2101 aa, Homo Sapiens
MTLHATRGAALLSWVNSLHVADPVEAVLQLQDCSIFIKIIDRIHGTEEGQQILKQPVSERLDFVCSFLQKNRKHPSSPECLVSAQKVLEGSELELAKMTMLLLYHSTMSSKSPRDWEQFEYKIQAELAVILKFVLDHEDGLNLNEDLENFLQKAPVPSTCSSTFPEELSPPSHQAKREIRFLELQKVASSSSGNNFLSGSPASPMGDILQTPQFQMRRLKKQLADERSNRDELELELAENRKLLTEKDAQIAMMQQRIDRLALLNEKQAASPLEPKELEELRDKNESLTMRLHETLKQCQDLKTEKSQMDRKINQLSEENGDLSFKLREFASHLQQLQDALNELTEEHSKATQEWLEKQAQLEKELSAALQDKKCLEEKNEILQGKLSQLEEHLSQLQDNPPQEKGEVLGDVLQLETLKQEAATLAANNTQLQARVEMLETERGQQEAKLLAERGHFEEEKQQLSSLITDLQSSISNLSQAKEELEQASQAHGARLTAQVASLTSELTTLNATIQQQDQELAGLKQQAKEKQAQLAQTLQQQEQASQGLRHQVEQLSSSLKQKEQQLKEVAEKQEATRQDHAQQLATAAEEREASLRERDAALKQLEALEKEKAAKLEILQQQLQVANEARDSAQTSVTQAQREKAELSRKVEELQACVETARQEQHEAQAQVAELELQLRSEQQKATEKERVAQEKDQLQEQLQALKESLKVTKGSLEEEKRRAADALEEQQRCISELKAETRSLVEQHKRERKELEEERAGRKGLEARLQQLGEAHQAETEVLRRELAEAMAAQHTAESECEQLVKEVAAWRERYEDSQQEEAQYGAMFQEQLMTLKEECEKARQELQEAKEKVAGIESHSELQISRQQNELAELHANLARALQQVQEKEVRAQKLADDLSTLQEKMAATSKEVARLETLVRKAGEQQETASRELVKEPARAGDRQPEWLEEQQGRQFCSTQAALQAMEREAEQMGNELERLRAALMESQGQQQEERGQQEREVARLTQERGRAQADLALEKAARAELEMRLQNALNEQRVEFATLQEALAHALTEKEGKDQELAKLRGLEAAQIKELEELRQTVKQLKEQLAKKEKEHASGSGAQSEAAGRTEPTGPKLEALRAEVSKLEQQCQKQQEQADSLERSLEAERASRAERDSALETLQGQLEEKAQELGHSQSALASAQRELAAFRTKVQDHSKAEDEWKAQVARGRQEAERKNSLISSLEEEVSILNRQVLEKEGESKELKRLVMAESEKSQKLEERLRLLQAETASNSARAAERSSALREEVQSLREEAEKQRVASENLRQELTSQAERAEELGQELKAWQEKFFQKEQALSTLQLEHTSTQALVSELLPAKHLCQQLQAEQAAAEKRHREELEQSKQAAGGLRAELLRAQRELGELIPLRQKVAEQERTAQQLRAEKASYAEQLSMLKKAHGLLAEENRGLGERANLGRQFLEVELDQAREKYVQELAAVRADAETRLAEVQREAQSTARELEVMTAKYEGAKVKVLEERQRFQEERQKLTAQVEELSKKLADSDQASKVQQQKLKAVQAQGGESQQEAQRLQAQLNELQAQLSQKEQAAEHYKLQMEKAKTHYDAKKQQNQELQEQLRSLEQLQKENKELRAEAERLGHELQQAGLKTKEAEQTCRHLTAQVRSLEAQVAHADQQLRDLGKFQVATDALKSREPQAKPQLDLSIDSLDLSCEEGTPLSITSKLPRTQPDGTSVPGEPASPISQRLPPKVESLESLYFTPIPARSQAPLESSLDSLGDVFLDSGRKTRSARRRTTQIINITMTKKLDVEEPDSANSSFYSTRSAPASQASLRATSSTQSLARLGSPDYGNSALLSLPGYRPTTRSSARRSQAGVSSGAPPGRNSFYMGTCQDEPEQLDDWNRIAELQQRNRVCPPHLKTCYPLESRPSLSLGTITDEEMKTGDPQETLRRASMQPIQIAEGTGITTRQQRKRVSLEPHQGPGTPESKKATSCFPRPMTPRDRHEGRKQSTTEAQKKAAPASTKQADRRQSMAFSILNTPKKLGNSLLRRGASKKALSKASPNTRSGTRRSPRIATTTASAATAAAIGATPRAKGKAKH

SEQ ID NO: 649 - protein, 321 aa, Homo Sapiens
MKPGFSPRGGGFGGRGGFGDRGGRGGRGGFGGGRGRGGGFRGRGRGGGGGGGGGGGGGRGGGGFHSGGNRGRGRGGKRGNQSGKNVMVEPHRHEGVFICRGKEDALVTKNLVPGESVYGEKRVSISEGDDKIEYRAWNPFRSKLAAAILGGVDQIHIKPGAKVLYLGAASGTTVSHVSDIVGPDGLVYAVEFSHRSGRDLINLAKKRTNIIPVIEDARHPHKYRMLIAMVDVIFADVAQPDQTRIVALNAHTFLRNGGHFVISIKANCIDSTASAEAVFASEVKKMQQENMKPQEQLTLEPYERDHAVVVGVYRPPPKVKN

SEQ ID NO: 650 - protein, 82 aa, Homo Sapiens
MAFTLYSLLQAALLCVNAIAVLHEERFLKNIGWGTDQGIGGFGEEPGIKSQLMNLIRSVRTVMRVPLIIVNSIAIVLLLLFG

SEQ ID NO: 651 - protein, 212 aa, Homo Sapiens
MAAPPQLRALLVVVNALLRKRRYHAALAVLKGFRNGAVYGAKIRAPHALVMTFLFRNGSLQEKLWAILQATYIHSWNLARFVFTYKGLRALQSYIQGKTYPAHAFLAAFLGGILVFGENNNINSQINMYLLSRVLFALSRLAVEKGYIPEPRWDPFPLLTAVVWGLVLWLFEYHRSTLQPSLQSSMTYLYEDSNVWHDISDFLVYNKSRPSN

SEQ ID NO: 652 - protein, 598 aa, Homo Sapiens
MMRLRGSGMLRDLLLRSPAGVSATLRRAQPLVTLCRRPRGGGRPAAGPAAAARLHPWWGGGGWPAEPLARGLSSSPSEILQELGKGSTHPQPGVSPPAAPAAPGPKDGPGETDAFGNSEGKELVASGENKIKQGLLPSLEDLLFYTIAEGQEKIPVHKFITALKSTGLRTSDPRLKECMDMLRLTLQTTSDGVMLDKDLFKKCVQSNIVLLTQAFRRKFVIPDFMSFTSHIDELYESAKKQSGGKVADYIPQLAKFSPDLWGVSVCTVDGQRHSTGDTKVPFCLQSCVKPLKYAIAVNDLGTEYVHRYVGKEPSGLRFNKLFLNEDDKPHNPMVNAGAIVVTSLIKQGVNNAEKFDYVMQFLNKMAGNEYVGFSNATFQSERESGDRNFAIGYYLKEKKCFPEGTDMVGILDFYFQLCSIEVTCESASVMAATLANGGFCPITGERVLSPEAVRNTLSLMHSCGMYDFSGQFAFHVGLPAKSGVAGGILLVVPNVMGMMCWSPPLDKMGNSVKGIHFCHDLVSLCNFHNYDNLRHFAKKLDPRREGGDQRHSFGPLDYESLQQELALKETVWKKVSPESNEDISTTVVYRMESLGEKS

SEQ ID NO: 653 - protein, 588 aa, Homo Sapiens
MALYQRWRCLRLQGLQACRLHTAVVSTPPRWLAERLGLFEELWAAQVKRLASMAQKEPRTIKISLPGGQKIDAVAWNTTPYQLARQISSTLADTAVAAQVNGEPYDLERPLETDSDLRFLTFDSPEGKAVFWHSSTHVLGAAAEQFLGAVLCRGPSTEYGFYHDFFLGKERTIRGSELPVLERICQELTAAARPFRRLEASRDQLRQLFKAEYAHRGFSEVKTPTLFSTKLWEQSGHWEHYQEDMFAVQPPGSDRPPSSQSDDSTRHITDTLALKPMNCPAHCLMFAHRPRSWRELPLRLADFGALHRAEASGGLGGLTRLRCFQQDDAHIFCTTDQLEAEIQSCLDFLRSVYAVLGFSFRLALSTRPSGFLGDPCLWDQAEQVLKQALKEFGEPWDLNSGDGAFYGPKIDVHLHDALGRPHQCGTIQLDFQLPLRFDLQYKGQAGALERPVLIHRAVLGSVERLLGVLAESCGGKWPLWLSPFQVVVIPVGSEQEEYAKEAQQSLRAAGLVSDLDADSGLTLSRRIRRAQLAHYNFQFVVGQKEQSKRTVNIRTRDNRRLGEWDLPEAVQRLVELQNTRVPNAEEIF

SEQ ID NO: 654 - protein, 277 aa, Homo Sapiens
MWPGILVGGARVASCRYPALGPRLAAHFPAQRPPQRTLQNGLALQRCLHATATRALPLIPIVVEQTGRGERAYDIYSRLLRERIVCVMGPIDDSVASLVIAQLLFLQSESNKKPIHMYINSPGGVVTAGLAIYDTMQYILNPICTWCVGQAASMGSLLLAAGTPGMRHSLPNSRIMIHQPSGGARGQATDIAIQAEEIMKLKKQLYNIYAKHTKQSLQVIESAMERDRYMSPMEAQEFGILDKVLVHPPQDGEDEPTLVQKEPVEAAPAAEPVPAST

SEQ ID NO: 655 - protein, 817 aa, Homo Sapiens
MSEQSICQARAAVMVYDDANKKWVPAGGSTGFSRVHIYHHTGNNTFRVVGRKIQDHQVVINCAIPKGLKYNQATQTFHQWRDARQVYGLNFGSKEDANVFASAMMHALEVLNSQETAQSKVTATQDSTNLRCIFCGPTLPRQNSQLPAQVQNGPSQEELEIQRRQLQEQQRQKELERERLERERMERERLERERLERERLERERLEQEQLERERQERERQERLERQERLERQERLERQERLDRERQERQERERLERLERERQERERQEQLEREQLEWERERRISSAAPSSDSSLYNAPLPEYSSCQPPSAPPPSYAKVISAPVSDATPDYAVVTALPPTSTPPTPPLRHSATRFATSLGSAFHPVLPHYATVPRPLNKNSRPSSPVNTPSSQPPATKPCAWSTSNFSPLPPSPPIMISSPPGKATGPRPVLPVCVSSPVPQMPPSPTAPNGLVDSVTYPVSPPPTSGPAAPPPPPPLPSLASLSHCGSQASPPPSTPIASTPSSKPSVLPSPSAAAPASVETPLNSVLGDSSASEPGLQAASQPAETPSQQGIVLGPLAPPPPPPLPPGPAQASVALPPPPGPPPPPPLPSTGPPPPPPPPPLPNQVPPPPPPPPAPPLPASGFFLASMSEDNRPLTGLAAAIAGAKLRKVSRMEDTSFPSGGNAIGVNSASSKTDTGRGNGPLPLGGSGLMEEMSALLARRRRIAEKGSTIETEQKEDKGEDSEPVTSKASSTSTPEPTRKPWERTNTMNGSKSPVISRPKSTPLSQPSANGVQTEGLDYDRLKQDILDEMRKELTKLKEELIDAIRQELSKSNTA

SEQ ID NO: 656 - protein, 430 aa, Homo Sapiens [sequence omitted]

SEQ ID NO: 657 - protein, 223 aa, Homo Sapiens
MASKLLRAVILGPPGSGKGTVCQRIAQNFGLQHLSSGHFLRENIKASTEVGEMAKQYIEKSLLVPDHVITRLMMSELENRRGQHWLLDGFPRTLGQAEALDKICEVDLVISLNIPFETLKDRLSRRWIHPPSGRVYNLDFNPPHVHGIDDVTGEPLVQQEDDKPEAVAARLRQYKDVAKPVIELYKSRGVLHQFSGTETNKIWPYVYTLFSNKITPIQSKEAY

SEQ ID NO: 658 - protein, 148 aa, Homo Sapiens
MAESDWDTVTVLRKKGPTAAQAKSKQAILAAQRRGEDVETSKKWAAGQNKQHSITKNTAKLDRETEELHHDRVTLEVGKVIQQGRQSKGLTQKDLATKINEKPQVIADYESGRAIPNNQVLGKIERAIGLKLRGKDIGKPIEKGPRAK

SEQ ID NO: 659 - protein, 169 aa, Homo Sapiens
MAVFGMGCFWGAERKFWVLKGVYSTQVGFAGGYTSNPTYKEVCSEKTGHAEVVRVVYQPEHMSFEELLKVFWENHDPTQGMRQGNDHGTQYRSAIYPTSAKQMEAALSSKENYQKVLSEHGFGPITTDIREGQTFYYAEDYHQQYLSKNPNGYCGLGGTGVSCPVGIKK

SEQ ID NO: 660 - protein, 708 aa, Homo Sapiens
MTERRRDELSEEINNLREKVMKQSEENNNLQSQVQKLTEENTTLREQVEPTPEDEDDDIELRGAAAAAAPPPPIEEECPEDLPEKFDGNPDMLAPFMAQCQIFMEKSTRDFSVDRVRVCFVTSMMTGRAARWASAKLERSHYLMHNYPAFMMEMKHVFEDPQRREVAKRKIRRLRQGMGSVIDYSNAFQMIAQDLDWNEPALIDQYHEGLSDHIQEELSHLEVAKSLSALIGQCIHIERRLARAAAARKPRSPPRALVLPHIASHHQVDPTEPVGGARMRLTQEEKERRRKLNLCLYCGTGGHYADNCPAKASKSSPAGKLPGPAVEGPSATGPEIIRSPQDDASSPHLQVMLQIHLPGRHTLFVRAMIDSGASGNFIDHEYVAQNGIPLRIKDWPILVEAIDGRPIASGPVVHETHDLIVDLGDHREVLSFDVTQSPFFPVVLGVRWLSTHDPNITWSTRSIVFDSEYCRYHCRMYSPIPPSLPPPAPQPPLYYPVDGYRVYQPVRYYYVQNVYTPVDEHVYPDHRLVDPHIEMIPGAHSIPSGHVYSLSEPEMAALRDFVARNVKDGLITPTIAPNGAQVLQVKRGWKLQVSYDCRAPNNFTIQNQYPRLSIPNLEDQAHLATYTEFVPQIPGYQTYPTYAAYPTYPVGFAWYPVGRDGQGRSLYVPVMITWNPHWYRQPPVPQYPPPQPPPPPPPPPPPPSYSTL

SEQ ID NO: 661 - protein, 394 aa, Homo Sapiens
MSREMQDVDLAEVKPLVEKGETITGLLQEFDVQEQDIETLHGSVHVTLCGTPKGNRPVILTYHDIGMNHKTCYNPLFNYEDMQEITQHFAVCHVDAPGQQDGAASFPAGYMYPSMDQLAEMLPGVLQQFGLKSIIGMGTGAGAYILTRFALNNPEMVEGLVLINVNPCAEGWMDWAASKISGWTQALPDMVVSHLFGKEEMQSNVEVVHTYRQHIVNDMNPGNLHLFINAYNSRRDLEIERPMPGTHTVTLQCPALLVVGDSSPAVDAVVECNSKLDPTKTTLLKMADCGGLPQISQPAKLAEAFKYFVQGMGYMPSASMTRLMRSRTASGSSVTSLDGTRSRSHTSEGTRSRSHTSEGTRSRSHTSEGAHLDITPNSGAAGNSAGPKSMEVSC

SEQ ID NO: 662 - protein, 482 aa, Homo Sapiens
MAQTQGTRRKVCYYYDGDVGNYYYGQGHPMKPHRIRMTHNLLLNYGLYRKMEIYRPHKANAEEMTKYHSDDYIKFLRSIRPDNMSEYSKQMQRFNVGEDCPVFDGLFEFCQLSTGGSVASAVKLNKQQTDIAVNWAGGLHHAKKSEASGFCYVNDIVLAILELLKYHQRVLYIDIDIHHGDGVEEAFYTTDRVMTVSFHKYGEYFPGTGDLRDIGAGKGKYYAVNYPLRDGIDDESYEAIFKPVMSKVMEMFQPSAVVLQCGSDSLSGDRLGCFNLTIKGHAKCVEFVKSFNLPMLMLGGGGYTIRNVARCWTYETAVALDTEIPNELPYNDYFEYFGPDFKLHISPSNMTNQNTNEYLEKIKQRLFENLRMLPHAPGVQMQAIPEDAIPEESGDEDEDDPDKRISICSSDKRIACEEEFSDSEEEGEGGRKNSSNFKKAKRVKTEDEKEKDPEEKKEVTEEEKTKEEKPEAKGVKEEVKLA

SEQ ID NO: 663 - protein, 1016 aa, Homo Sapiens [sequence omitted]

SEQ ID NO: 664 - protein, 336 aa, Homo Sapiens
MEKLRLLGLRYQEYVTRHPAATAQLETAVRGFSYLLAGRFADSHELSELVYSASNLLVLLNDGILRKELRKKLPVSLSQQKLLTWLSVLECVEVFMEMGAAKVWGEVGRWLVIALVQLAKAVLRMLLLLWFKAGLQTSPPIVPLDRETQAQPPDGDHSPGNHEQSYVGKRSNRVVRTLQNTPSLHSRHWGAPQQREGRQQQHHEELSATPTPLGLQETIAEFLYIARPLLHLLSLGLWGQRSWKPWLLAGVVDVTSLSLLSDRKGLTRRERRELRRRTILLLYYLLRSPFYDRFSEARILFLLQLLADHVPGVGLVTRPLMDYLPTWQKIYFYSWG

SEQ ID NO: 665 - protein, 622 aa, Homo Sapiens
MAAAPRAGRRRGQPLLALLLLLLAPLPPGAPPGADAYFPEERWSPESPLQAPRVLIALLARNAAHALPTTLGALERLRHPRERTALWVATDHNMDNTSTVLREWLVAVKSLYHSVEWRPAEEPRSYPDEEGPKHWSDSRYEHVMKLRQAALKSARDMWADYILFVDADNLILNPDTLSLLIAENKTVVAPMLDSRAAYSNFWCGMTSQGYYKRTPAYIPIRKRDRRGCFAVPMVHSTFLIDLRKAASRNLAFYPPHPDYTWSFDDIIVFAFSCKQAEVQMYVCNKEEYGFLPVPLRAHSTLQDEAESFMHVQLEVMVKHPPAEPSRFISAPTKTPDKMGFDEVFMINLRRRQDRRERMLRALQAQEIECRLVEAVDGKAMNTSQVEALGIQMLPGYRDPYHGRPLTKGELGCFLSHYNIWKEVVDRGLQKSLVFEDDLRFEIFFKRRLMNLMRDVEREGLDWDLIYVGRKRMQVEHPEKAVPRVRNLVEADYSYWTLAYVISLQGARKLLAAEPLSKMLPVDEFLPVMFDKHPVSEYKAHFSLRNLHAFSVEPLLIYPTHYTGDDGYVSDTETSVVWNNEHVKTDWDRAKSQKMREQQALSREAKNSDVLQSPLDSAARDEL

SEQ ID NO: 666 - protein, 475 aa, Homo Sapiens
MSDFDEFERQLNENKQERDKENRHRKRSHSRSRSRDRKRRSRSRDRRNRDQRSASRDRRRRSKPLTRGAKEEHGGLIRSPRHEKKKKVRKYWDVPPPGFEHITPMQYKAMQAAGQIPATALLPTMTPDGLAVTPTPVPVVGSQMTRQARRLYVGNIPFGITEEAMMDFFNAQMRLGGLTQAPGNPVLAVQINQDKNFAFLEFRSVDETTQAMAFDGIIFQGQSLKIRRPHDYQPLPGMSENPSVYVPGVVSTVVPDSAHKLFIGGLPNYLNDDQVKELLTSFGPLKAFNLVKDSATGLSKGYAFCEYVDINVTDQAIAGLNGMQLGDKKLLVQRASVGAKNATLVSPPSTINQTPVTLQVPGLMSSQVQMGGHPTEVLCLMNMVLPEELLDDEEYEEIVEDVRDECSKYGLVKSIEIPRPVDGVEVPGCGKIFVEFTSVFDCQKAMQGLTGRKFANRVVVTKYCDPDSYHRRDFW

SEQ ID NO: 667 - protein, 523 aa, Homo Sapiens
MMLRGNLKQVRIEKNPARLRALESAVGESEPAAAAAMALALAGEPAPPAPAPPEDHPDEEMGFTIDIKSFLKPGEKTYTQRCRLFVGNLPTDITEEDFKRLFERYGEPSEVFINRDRGFGFIRLESRTLAEIAKAELDGTILKSRPLRIRFATHGAALTVKNLSPVVSNELLEQAFSQFGPVEKAVVVVDDRGRATGKGFVEFAAKPPARKALERCGDGAFLLTTTPRPVIVEPMEQFDDEDGLPEKLMQKTQQYHKEREQPPRFAQPGTFEFEYASRWKALDEMEKQQREQVDRNIREAKEKLEAEMEAARHEHQLMLMRQDLMRRQEELRRLEELRNQELQKRKQIQLRHEEEHRRREEEMIRHREQEELRRQQEGFKPNYMENREQEMRMGDMGPRGAINMGDAFSPAPAGNQGPPPMMGMNMNNRATIPGPPMGPGPAMGPEGAANMGTPMMPDNGAVHNDRFPQGPPSQMGSPMGSRTGSETPQAPMSGVGPVSGGPGGFGRGSQGGNFEGPNKRRRY

SEQ ID NO: 668 - protein, 551 aa, Homo Sapiens
MSGGEQKPERYYVGVDVGTGSVRAALVDQSGVLLAFADQPIKNWEPQFNHHEQSSEDIWAACCVVTKKVVQGIDLNQIRGLGFDATCSLVVLDKQFHPLPVNQEGDSHRNVIMWLDHRAVSQVNRINETKHSVLQYVGGVMSVEMQAPKLLWLKENLREICWDKAGHFFDLPDFLSWKATGVTARSLCSLVCKWTYSAEKGWDDSFWKMIGLEDFVADNYSKIGNQVLPPGASLGNGLTPEAARDLGLLPGIAVAASLIDAHAGGLGVIGADVRGHGLICEGQPVTSRLAVICGTSSCHMGISKDPIFVPGVWGPYFSAMVPGFWLNEGGQSVTGKLIDHMVQGHAAFPELQVKATARCQSIYAYLNSHLDLIKKAQPVGFLTVDLHVWPDFHGNRSPLADLTLKGMVTGLKLSQDLDDLAILYLATVQAIALGTRFIIEAMEAAGHSISTLFLCGGLSKNPLFVQMHADITGMPVVLSQEVESVLVGAAVLGACASGDFASVQEAMAKMSKVGKVVFPRLQDKKYYDKKYQVFLKLVEHQKEYLAIMNDD

SEQ ID NO: 669 - protein, 1375 aa, Homo Sapiens
MEGDRVAGRPVLSSLPVLLLLPLLMLRAAALHPDELFPHGESWGDQLLQEGDDESSAVVKLANPLHFYEARFSNLYVGTNGIISTQDFPRETQYVDYDFPTDFPAIAPFLADIDTSHGRGRVLYREDTSPAVLGLAARYVRAGFPRSARFTPTHAFLATWEQVGAYEEVKRGALPSGELNTFQAVLASDGSDSYALFLYPANGLQFLGTRPKESYNVQLQLPARVGFCRGEADDLKSEGPYFSLTSTEQSVKNLYQLSNLGIPGVWAFHIGSTSPLDNVRPAAVGDLSAAHSSVPLGRSFSHATALESDYNEDNLDYYDVNEEEAEYLPGEPEEALNGHSSIDVSFQSKVDTKPLEESSTLDPHTKEGTSLGEVGGPDLKGQVEPWDERETRSPAPPEVDRDSLAPSWETPPPYPENGSIQPYPDGGPVPSEMDVPPAHPEEEIVLRSYPASGHTTPLSRGTYEVGLEDNIGSNTEVFTYNAANKETCEHNHRQCSRHAFCTDYATGFCCHCQSKFYGNGKHCLPEGAPHRVNGKVSGHLHVGHTPVHFTDVDLHAYIVGNDGRAYTAISHIPQPAAQALLPLTPIGGLFGWLFALEKPGSENGFSLAGAAFTHDMEVTFYPGEETVRITQTAEGLDPENYLSIKTNIQGQVPYVSANFTAHISPYKELYHYSDSTVTSTSSRDYSLTFGAINQTWSYRIHQNITYQVCRHAPRHPSFPTTQQLNVDRVFALYNDEERVLRFAVTNQIGPVKEDSDPTPGNPCYDGSHMCDTTARCHPGTGVDYTCECASGYQGDGRNCVDENECATGFHRCGPNSVCINLPGSYRCECRSGYEFADDRHTCILITPPANPCEDGSHTCAPAGQARCVHHGGSTFSCACLPGYAGDGHQCTDVDECSENRCHPAATCYNTPGSFSCRCQPGYYGDGFQCIPDSTSSLTPCEQQQRHAQAQYAYPGARFHIPQCDEQGNFLPLQCHGSTGFCWCVDPDGHEVPGTQTPPGSTPPHCGPSPEPTQRPPTICERWRENLLEHYGGTPRDDQYVPQCDDLGHFIPLQCHGKSDFCWCVDKDGREVQGTRSQPGTTPACIPTVAPPMVRPTPRPDVTPPSVGTFLLYTQGQQIGYLPLNGTRLQKDAAKTLLSLHGSIIVGIDYDCRERMVYWTDVAGRTISRAGLELGAEPETIVNSGLISPEGLAIDHIRRTMYWTDSVLDKIESALLDGSERKVLFYTDLVNPRAIAVDPIRGNLYWTDWNREAPKIETSSLDGENRRILINTDIGLPNGLTFDPFSKLLCWADAGTKKLECTLPDGTGRRVIQNNLKYPFSIVSYADHFYHTDWRRDGVVSVNKHSGQFTDEYLPEQRSHLYGITAVYPYCPTGRK

SEQ ID NO: 670 - protein, 424 aa, Homo Sapiens
MERCRILLEAARIIREREDEIATMECINNGKSIFEARLDIDISWQCLEYYAGLAASMAGEHIQLPGGSFGYTRREPLGVCVGIGAWNYPFQIASWKSAPALACGNAMVFKPSPFTPVSALLLAEIYSEAGVPPGLFNVVQGGAATGQFLCQHPDVAKVSFTGSVPTGMKIMEMSAKGIKPVTLELGGKSPLIIFSDCDMNNAVKGALMANFLTQGQVCCNGTRVFVQKEILDKFTEEVVKQTQRIKIGDPLLEDTRMGPLINRPHLERVLGFVKVAKEQGAKVLCGGDIYVPEDPKLKDGYYMRPCVLTNCRDDMTCVKEEIFGPVMSILSFDTEAEVLERANDTTFGLAAGVFTRDIQRAHRVVAELQAGTCFINNYNVSPVELPFGGYKKSGFGRENGRVTIEYYSQLKTVCVEMGDVESAF

SEQ ID NO: 671 - protein, 258 aa, Homo Sapiens
MMVLQVSAAPRTVALTALLMVLLTSVVQGRATPENYLFQGRQECYAFNGTQRFLERYIYNREEFVRFDSDVGEFRAVTELGRPDEEYWNSQKDILEEERAVPDRMCRHNYELGGPMTLQRRVQPRVNVSPSKKGPLQHHNLLVCHVTDFYPGSIQVRWFLNGQEETAGVVSTNLIRNGDWTFQILVMLEMTPQQGDVYTCQVEHTSLDSPVTVEWKAQSDSARSKTLTGAGGFVLGLIICGVGIFMHRRSKKVQRGSA

SEQ ID NO: 672 - protein, 917 aa, Homo Sapiens
MFAVHLMAFYFSKLKEDQIKKVDRFLYHMRLSDDTLLDIMRRFRAEMEKGLAKDTNPTAAVKMLPTFVRAIPDGSENGEFLSLDLGGSKFRVLKVQVAEEGKRHVQMESQFYPTPNEIIRGNGTELFEYVADCLADFMKTKDLKHKKLPLGLTFSFPCRQTKLEEGVLLSWTKKFKARGVQDTDVVSRLTKAMRRHKDMDVDILALVNDTVGTMMTCAYDDPYCEVGVIIGTGTNACYMEDMSNIDLVEGDEGRMCINTEWGAFGDDGALEDIRTEFDRELDLGSLNPGKQLFEKMISGLYLGELVRLILLKMAKAGLLFGGEKSSALHTKGKIETRHVAAMEKYKEGLANTREILVDLGLEPSEADCIAVQHVCTIVSFRSANLCAAALAAILTRLRENKKVERLRTTVGMDGTLYKIHPQYPKRLHKVVRKLVPSCDVRFLLSESGSTKGAAMVTAVASRVQAQRKQIDRVLALFQLTREQLVDVQAKMRAELEYGLKKKSHGLATVRMLPTYVCGLPDGTEKGKFLALDLGGTNFRVLLVKIRSGRRSVRMYNKIFAIPLEIMQGTGEELFDHIVQCIADFLDYMGLKGASLPLGFTFSFPCRQMSIDKGTLIGWTKGFKATDCEGEDVVDMLREAIKRRNEFDLDIVAVVNDTVGTMMTCGYEDPNCEIGLIAGTGSNMCYMEDMRNIEMVEGGEGKMCINTEWGGFGDNGCIDDIWTRYDTEVDEGSLNPGKQRYEKMTSGMYLGEIVRQILIDLTKQGLLFRGQISERLRTRGIFETKFLSQIESDRLALLQVRRILQQLGLDSTCEDSIVVKEVCGAVSRRAAQLCGAGLAAIVEKRREDQGLEHLRITVGVDGTLYKLHPHFSRILQETVKELAPRCDVTFMLSEDGSGKGAALITAVAKRLQQAQKEN

SEQ ID NO: 673 - protein, 469 aa, Homo Sapiens
MGTVHARSLEPLPSSGPDFGGLGEEAEFVEVEPEAKQEILENKDVVVQHVHFDGLGRTKDDIIICEIGDVFKAKNLIEVMRKSHEAREKLLRLGIFRQVDVLIDTCQGDDALPNGLDVTFEVTELRRLTGSYNTMVGNNEGSMVLGLKLPNLLGRAEKVTFQFSYGTKETSYGLSFFKPRPGNFERNFSVNLYKVTGQFPWSSLRETDRGMSAEYSFPIWKTSHTVKWEGVWRELGCLSRTASFAVRKESGHSLKSSLSHAMVIDSRNSSILPRRGALLKVNQELAGYTGGDVSFIKEDFELQLNKQLIFDSVFSASFWGGMLVPIGDKPSSIADRFYLGGPTSIRGFSMHSIGPQSEGDYLGGEAYWAGGLHLYTPLPFRPGQGGFGELFRTHFFLNAGNLCNLNYGEGPKAHIRKLAECIRWSYGAGIVLRLGNIARLELNYCVPMGVQTGDRICDGVQFGAGIRFL

SEQ ID NO: 674 - protein, 971 aa, Homo Sapiens
MELSDANLQTLTEYLKKTLDPDPAIRRPAEKFLESVEGNQNYPLLLLTLLEKSQDNVIKVCASVTFKNYIKRNWRIVEDEPNKICEADRVAIKANIVHLMLSSPEQIQKQLSDAISIIGREDFPQKWPDLLTEMVNRFQSGDFHVINGVLRTAHSLFKRYRHEFKSNELWTEIKLVLDAFALPLTNLFKATIELCSTHANDASALRILFSSLILISKLFYSLNFQDLPEFFEDNMETWMNNFHTLLTLDNKLLQTDDEEEAGLLELLKSQICDNAALYAQKYDEEFQRYLPRFVTAIWNLLVTTGQEVKYDLLVSNAIQFLASVCERPHYKNLFEDQNTLTSICEKVIVPNMEFRAADEEAFEDNSEEYIRRDLEGSDIDTRRRAACDLVRGLCKFFEGPVTGIFSGYVNSMLQEYAKNPSVNWKHKDAAIYLVTSLASKAQTQKHGITQANELVNLTEFFVNHILPDLKSANVNEFPVLKADGIKYIMIFRNQVPKEHLLVSIPLLINHLQAESIVVHTYAAHALERLFTMRGPNNATLFTAAEIAPFVEILLTNLFKALTLPGSSENEYIMKAIMRSFSLLQEAIIPYIPTLITQLTQKLLAVSKNPSKPHFNHYMFEAICLSIRITCKANPAAVVNFEEALFLVFTEILQNDVQEFIPYVFQVMSLLLETHKNDIPSSYMALFPHLLQPVLWERTGNIPALVRLLQAFLERGSNTIASAAADKIPGLLGVFQKLIASKANDHQGFYLLNSIIEHMPPESVDQYRKQIFILLFQRLQNSKTTKFIKSFLVFINLYCIKYGALALQEIFDGIQPKMFGMVLEKIIIPEIQKVSGNVEKKICAVGITKLLTECPPMMDTEYTKLWTPLLQSLIGLFELPEDDTIPDEEHFIDIEDTPGYQTAFSQLAFAGKKEHDPVGQMVNNPKIHLAQSLHKLSTACPGRVPSMVSTSLNAEALQYLQGYLQAASVTLL

SEQ ID NO: 675 - protein, 732 aa, Homo Sapiens [sequence omitted]

SEQ ID NO: 676 - protein, 681 aa, Homo Sapiens
MAGFWVGTAPLVAAGRRGRWPPQQLMLSAALRTLKHVLYYSRQCLMVSRNLGSVGYDPNEKTFDKILVANRGEIACRVIRTCKKMGIKTVAIHSDVDASSVHVKMADEAVCVGPAPTSKSYLNMDAIMEAIKKTRAQAVHPGYGFLSENKEFARCLAAEDVVFIGPDTHAIQAMGDKIESKLLAKKAEVNTIPGFDGVVKDAEEAVRIAREIGYPVMIKASAGGGGKGMRIAWDDEETRDGFRLSSQEAASSFGDDRLLIEKFIDNPRHIEIQVLGDKHGNALWLNERECSIQRRNQKVVEEAPSIFLDAETRRAMGEQAVALARAVKYSSAGTVEFLVDSKKNFYFLEMNTRLQVEHPVTECITGLDLVQEMIRVAKGYPLRHKQADIRINGWAVECRVYAEDPYKSFGLPSIGRLSQYQEPLHLPGVRVDSGIQPGSDISIYYDPMISKLITYGSDRTEALKRMADALDNYVIRGVTHNIALLREVIINSRFVKGDISTKFLSDVYPDGFKGHMLTKSEKNQLLAIASSLFVAFQLRAQHFQENSRMPVIKPDIANWELSVKLHDKVHTVVASNNGSVFSVEVDGSKLNVTSTWNLASPLLSVSVDGTQRTVQCLSREAGGNMSIQFLGTVVAEGQEICVIEAMKMQNSMTAGKTGTVKSVHCQAGDTVGEGDLLVELE

SEQ ID NO: 677 - protein, 447 aa, Homo Sapiens [sequence omitted]

SEQ ID NO: 678 - protein, 226 aa, Homo Sapiens
MGPLPRTVELFYDVLSPYSWLGFEILCRYQNIWNINLQLRPSLITGIMKDSGNKPPGLLPRKGLYMANDLKLLRHHLQIPIHFPKDFLSVMLEKGSLSAMRFLTAVNLEHPEMLEKASRELWMRVWSRNEDITEPQSILAAAEKAGMSAEQAQGLLEKIATPKVKNQLKETTEAACRYGAFGLPITVAHVDGQTHMLFGSDRMELLAHLLGEKWMGPIPPAVNARL

SEQ ID NO: 679 - protein, 414 aa, Homo Sapiens
MSKKISGGSVVEMQGDEMTRIIWELIKEKLIFPYVELDLHSYDLGIENRDATNDQVTKDAAEAIKKHNVGVKCATITPDEKRVEEFKLKQMWKSPNGTIRNILGGTVFREAIICKNIPRLVSGWVKPIIIGRHAYGDQYRATDFVVPGPGKVEITYTPSDGTQKVTYLVHNFEEGGGVAMGMYNQDKSIEDFAHSSFQMALSKGWPLYLSTKNTILKKYDGRFKDIFQEIYDKQYKSQFEAQKIWYEHRLIDDMVAQAMKSEGGFIWACKNYDGDVQSDSVAQGYGSLGMMTSVLVCPDGKTVEAEAAHGTVTRHYRMYQKGQETSTNPIASIFAWTRGLAHRAKLDNNKELAFFANALEEVSIETIEAGFMTKDLAACIKGLPNVQRSDYLNTFEFMDKLGENLKIKLAQAKL

SEQ ID NO: 680 - protein, 305 aa, Homo Sapiens
MGIQTSPVLLASLGVGLVTLLGLAVGSYLVRRSRRPQVTLLDPNEKYLLRLLDKTTVSHNTKRFRFALPTAHHTLGLPVGKHIYLSTRIDGSLVIRPYTPVTSDEDQGYVDLVIKVYLKGVHPKFPEGGKMSQYLDSLKVGDVVEFRGPSGLLTYTGKGHFNIQPNKKSPPEPRVAKKLGMIAGGTGITPMLQLIRAILKVPEDPTQCFLLFANQTEKDIILREDLEELQARYPNRFKLWFTLDHPPKDWAYSKGFVTADMIREHLPAPGDDVLVLLCGPPPMVQLACHPNLDKLGYSQKMRFTY

SEQ ID NO: 681 - protein, 774 aa, Homo Sapiens
MRPLLLLALLGWLLLAEAKGDAKPEAPCCQEGLRAGGSGSLHLGRDFTVLAGARGSPSPSVSSIPRFWIPGSDNLLVLTVATKETEGFRRFKRSAQFFNYKIQALGLGEDWNVEKGTSAGGGQKVRLLKKALEKHADKEDLVILFADSYDVLFASGPRELLKKFRQARSQVVFSAEELIYPDRRLETKYPVVSDGKRFLGSGGFIGYAPNLSKLVAEWEGQDSDSDQLFYTKIFLDPEKREQINITLDHRCRIFQNLDGALDEVVLKFEMGHVRARNLAYDTLPVLIHGNGPTKLQLNYLGNYIPRFWTFETGCTVCDEGLRSLKGIGDEALPTVLVGVFIEQPTPFVSLFFQRLLRLHYPQKHMRLFIHNHEQHHKAQVEEFLAQHGSEYQSVKLVGPEVRMANADARNMGADLCRQDRSCTYYFSVDADVALTEPNSLRLLIQQNKNVIAPLMTRHGRLWSNFWGALSADGYYARSEDYVDIVQGRRVGVWNVPYISNIYLIKGSALRGELQSSDLFHHSKLDPDMAFCANIRQQDVFMFLTNRHTLGHLLSLDSYRTTHLHNDLWEVFSNPEDWKEKYIHQNYTKALAGKLVETPCPDVYWFPIFTEVACDELVEEMEHFGQWSLGNNKDNRIQGGYENVPTIDIHMNQIGFEREWHKFLLEYIAPMTEKLYPGYYTRAQFDLAFVVRYKPDEQPSLMPHHDASTFTINIALNRVGVDYEGGGCRFLRYNCSIRAPRKGWTLMHPGRLTHYHEGLPTTRGTRYIAVSFVDP

SEQ ID NO: 682 - protein, 528 aa, Homo Sapiens
MALKWTTVLLIQLSFYFSSGSCGKVLVWAAEYSLWMNMKTILKELVQRGHEVTVLASSASILFDPNDSSTLKLEVYPTSLTKTEFENIIMQLVKRLSEIQKDTFWLPFSQEQEILWAINDIIRNFCKDVVSNKKLMKKLQESRFDIVFADAYLPCGELLAELFNIPFVYSHSFSPGYSFERHSGGFIFPPSYVPVVMSKLSDQMTFMERVKNMLYVLYFDFWFQIFNMKKWDQFYSEVLGRPTTLSETMRKADIWLMRNSWNFKFPHPFLPNVDFVGGLHCKPAKPLPKEMEEFVQSSGENGVVVFSLGSMVSNMTEERANVIATALAKIPQKVLWRFDGNKPDALGLNTRLYKWIPQNDLLGHPKTRAFITHGGANGIYEAIYHGIPMVGIPLFFDQPDNIAHMKAKGAAVRVDFNTMSSTDLLNALKTVINDPSYKENIMKLSRIQHDQPVKPLDRAVFWIEFVMRHKGAKHLRVAAHNLTWFQYHSLDVIGFLLACVATVLFIITKCCLFCFWKFARKGKKGKRD

SEQ ID NO: 683 - protein, 338 aa, Homo Sapiens
MGQREMWRLMSRFNAFKRTNTILHHLRMSKHTDAAEEVLLEKKGCTGVITLNRPKFLNALTLNMIRQIYPQLKKWEQDPETFLIIIKGAGGKAFCAGGDIRVISEAEKAKQKIAPVFFREEYMLNNAVGSCQKPYVALIHGITMGGGVGLSVHGQFRVATEKCLFAMPETAIGLFPDVGGGYFLPRLQGKLGYFLALTGFRLKGRDVYRAGIATHFVDSEKLAMLEEDLLALKSPSKENIASVLENYHTESKIDRDKSFILEEHMDKINSCFSANTVEEIIENLQQDGSSFALEQLKVINKMSPTSLKITLRQLMEGSSKTLQEVLTMEYRLSQACMF

SEQ ID NO: 684 - protein, 250 aa, Homo Sapiens [sequence omitted]

SEQ ID NO: 685 - protein, 451 aa, Homo Sapiens
MRECISIHVGQAGVQIGNACWELYCLEHGIQPDGQMPSDKTIGGGDDSFNTFFSETGAGKHVPRAVFVDLEPTVIDEVRTGTYRQLFHPEQLITGKEDAANNYARGHYTIGKEIIDLVLDRIRKLADQCTGLQGFLVFHSFGGGTGSGFTSLLMERLSVDYGKKSKLEFSIYPAPQVSTAVVEPYNSILTTHTTLEHSDCAFMVDNEAIYDICRRNLDIERPTYTNLNRLIGQIVSSITASLRFDGALNVDLTEFQTNLVPYPRIHFPLATYAPVISAEKAYHEQLSVAEITNACFEPANQMVKCDPRHGKYMACCLLYRGDVVPKDVNAAIATIKTKRTIQFVDWCPTGFKVGINYQPPTVVPGGDLAKVQRAVCMLSNTTAIAEAWARLDHKFDLMYAKRAFVHWYVGEGMEEGEFSEAREDMAALEKDYEEVGVDSVEGEGEEEGEEY

SEQ ID NO: 686 - protein, 250 aa, Homo Sapiens
MTPLCPRPALCYHFLTSLLRSAMQNARTAEGRSRGTLRARPAPRPAAQHGIPRPLSSAGRLSQGCRGASTVGAAGWKGELPKAGGSPAPGPETPAISPSKRARPAEVGGMQLRFARLSEHATAPTRGSARAAGYDLYSAYDYTIPPMEKAVVKTDIQIALPSGCYGRVAPRSGLAAKHFIDVGAGVIDEDYRGNVGVVLFNFGKEKFEVKKGDRIAQLICERIFYPEIEEVQALDDTERGSGGFGSTGKN

SEQ ID NO: 687 - protein, 466 aa, Homo Sapiens [sequence omitted]

SEQ ID NO: 688 - protein, 425 aa, Homo Sapiens [sequence omitted]

SEQ ID NO: 689 - protein, 802 aa, Homo Sapiens
MPRIMIKGGVWRNTEDEILKAAVMKYGKNQWSRIASLLHRKSAKQCKARWYEWLDPSIKKTEWSREEEEKLLHLAKLMPTQWRTIAPIIGRTAAQCLEHYEFLLDKAAQRDNEEETTDDPRKLKPGEIDPNPETKPARPDPIDMDEDELEMLSEARARLANTQGKKAKRKAREKQLEEARRLAALQKRRELRAAGIEIQKKRKRKRGVDYNAEIPFEKKPALGFYDTSEENYQALDADFRKLRQQDLDGELRSEKEGRDRKKDKQHLKRKKESDLPSAILQTSGVSEFTKKRSKLVLPAPQISDAELQEVVKVGQASEIARQTAEESGITNSASSTLLSEYNVTNNSVALRTPRTPASQDRILQEAQNLMALTNVDTPLKGGLNTPLHESDFSGVTPQRQVVQTPNTVLSTPFRTPSNGAEGLTPRSGTTPKPVINSTPGRTPLRDKLNINPEDGMADYSDPSYVKQMERESREHLRLGLLGLPAPKNDFEIVLPENAEKELEEREIDDTYIEDAADVDARKQAIRDAERVKEMKRMHKAVQKDLPRPSEVNETILRPLNVEPPLTDLQKSEELIKKEMITMLHYDLLHHPYEPSGNKKGKTVGFGTNNSEHITYLEHNPYEKFSKEELKKAQDVLVQEMEVVKQGMSHGELSSEAYNQVWEECYSQVLYLPGQSRYTRANLASKKDRIESLEKRLEINRGHMTTEAKRAAKMEKKMKILLGGYQSRAMGLMKQLNDLWDQIEQAHLELRTFEELKKHEDSAIPRRLECLKEDVQRQQEREKELQHRYADLLLEKETLKSKF

SEQ ID NO: 690 - protein, 258 aa, Homo Sapiens
MAAPAPGLISVFSSSQELGAALAQLVAQRAACCLAGARARFALGLSGGSLVSMLARELPAAVAPAGPASLARWTLGFCDERLVPFDHAESTYGLYRTHLLSRLPIPESQVITINPELPVEEAAEDYAKKLRQAFQGDSIPVFDLLILGVGPDGHTCSLFPDHPLLQEREKIVAPISDSPKPPPQRVTLTLPVLNAARTVIFVATGEGKAAVLKRILEDQEENPLPAALVQPHTGKLCWFLDEAAARLLTVPFEKHSTL

SEQ ID NO: 691 - protein, 146 aa, Homo Sapiens [sequence omitted]

SEQ ID NO: 692 - protein, 531 aa, Homo Sapiens
MSKPHSEAGTAFIQTQQLHAAMADTFLEHMCRLDIDSPPITARNTGIICTIGPASRSVETLKEMIKSGMNVARLNFSHGTHEYHAETIKNVRTATESFASDPILYRPVAVALDTKGPEIRTGLIKGSGTAEVELKKGATLKITLDNAYMEKCDENILWLDYKNICKVVEVGSKIYVDDGLISLQVKQKGADFLVTEVENGGSLGSKKGVNLPGAAVDLPAVSEKDIQDLKFGVEQDVDMVFASFIRKASDVHEVRKVLGEKGKNIKIISKIENHEGVRRFDEILEASDGIMVARGDLGIEIPAEKVFLAQKMMIGRCNRAGKPVICATQMLESMIKKPRPTRAEGSDVANAVLDGADCIMLSGETAKGDYPLEAVRMQHLIAREAEAAIYHLQLFEELRRLAPITSDPTEATAVGAVEASFKCCSGAIIVLTKSGRSAHQVARYRPRAPIIAVTRNPQTARQAHLYRGIFPVLCKDPVQEAWAEDVDLRVNFAMNVGKARGFFKKGDVVIVLTGWRPGSGFTNTMRVVPVP

SEQ ID NO: 693 - protein, 744 aa, Homo Sapiens
MAGRSMQAARCPTDELSLTNCAVVNEKDFQSGQHVIVRTSPNHRYTFTLKTHPSVVPGSIAFSLPQRKWAGLSIGQEIEVSLYTFDKAKQCIGTMTIEIDFLQKKSIDSNPYDTDKMAAEFIQQFNNQAFSVGQQLVFSFNEKLFGLLVKDIEAMDPSILKGEPATGKRQKIEVGLVVGNSQVAFEKAENSSLNLIGKAKTKENRQSIINPDWNFEKMGIGGLDKEFSDIFRRAFASRVFPPEIVEQMGCKHVKGILLYGPPGCGKTLLARQIGKMLNAREPKVVNGPEILNKYVGESEANIRKLFADAEEEQRRLGANSGLHIIIFDEIDAICKQRGSMAGSTGVHDTVVNQLLSKIDGVEQLNNILVIGMTNRPDLIDEALLRPGRLEVKMEIGLPDEKGRLQILHIHTARMRGHQLLSADVDIKELAVETKNFSGAELEGLVRAAQSTAMNRHIKASTKVEVDMEKAESLQVTRGDFLASLENDIKPAFGTNQEDYASYIMNGIIKWGDPVTRVLDDGELLVQQTKNSDRTPLVSVLLEGPPHSGKTALAAKIAEESNFPFIKICSPDKMIGFSETAKCQAMKKIFDDAYKSQLSCVVVDDIERLLDYVPIGPRFSNLVLQALLVLLKKAPPQGRKLLIIGTTSRKDVLQEMEMLNAFSTTIHVPNIATGEQLLEALELLGNFKDKERTTIAQQVKGKKVWIGIKKLLMLIEMSLQMDPEYRVRKFLALLREEGASPLDFD

SEQ ID NO: 694 - protein, 335 aa, Homo Sapiens
MGKVKVGVNGFGRIGRLVTRAAFNSGKVDIVAINDPFIDLNYMVYMFQYDSTHGKFHGTVKAENGKLVINGNPITIFQERDPSKIKWGDAGAEYVVESTGVFTTMEKAGAHLQGGAKRVIISAPSADAPMFVMGVNHEKYDNSLKIISNASCTTNCLAPLAKVIHDNFGIVEGLMTTVHAITATQKTVDGPSGKLWRDGRGALQNIIPASTGAAKAVGKVIPELNGKLTGMAFRVPTANVSVVDLTCRLEKPAKYDDIKKVVKQASEGPLKGILGYTEHQVVSSDFNSDTHSSTFDAGAGIALNDHFVKLISWYDNEFGYSNRVVDLMAHMASKE

SEQ ID NO: 695 - protein, 577 aa, Homo Sapiens
MHWLRKVQGLCTLWGTQMSSRTLYINSRQLVSLQWGHQEVPAKFNFASDVLDHWADMEKAGKRLPSPALWWVNGKGKELMWNFRELSENSQQAANILSGACGLQRGDRVAVMLPRVPEWWLVILGCIRAGLIFMPGTIQMKSTDILYRLQMSKAKAIVAGDEVIQEVDTVASECPSLRIKLLVSEKSCDGWLNFKKLLNEASTTHHCVETGSQEASAIYFTSGTSGLPKMAEHSYSSLGLKAKMDAGWTGLQASDIMWTISDTGWILNILGSLLESWTLGACTFVHLLPKFDPLVILKTLSSYPIKSMMGAPIVYRMLLQQDLSSYKFPHLQNCLAGGESLLPETLENWRAQTGLDIREFYGQTETGLTCMVSKTMKIKPGYMGTAASCYDVQVIDDKGNVLPPGTEGDIGIRVKPIRPIGIFSGYVENPDKTAANIRGDFWLLGDRGIKDEDGYFQFMGRADDIINSSGYRIGPSEVENALMKHPAVVETAVISSPDPVRGEVVKAFVILASQFLSHDPEQLTKELQQHVKSVTAPYKYPRKIEFVLNLPKTVTGKIQRTKLRDKEWKMSGKARAQ

SEQ ID NO: 696 - protein, 594 aa, Homo Sapiens
MVLLHVLFEHAVGYALLALKEVEEISLLQPQVEESVLNLGKFHSIVRLVAFCPFASSQVALENANAVSEGVVHEDLRLLLETHLPSKKKKVLLGVGDPKIGAAIQEELGYNCQTGGVIAEILRGVRLHFHNLVKGLTDLSACKAQLGLGHSYSRAKVKFNVNRVDNMIIQSISLLDQLDKDINTFSMRVREWYGYHFPELVKIINDNATYCRLAQFIGNRRELNEDKLEKLEELTMDGAKAKAILDASRSSMGMDISAIDLINIESFSSRVVSLSEYRQSLHTYLRSKMSQVAPSLSALIGEAVGARLIAHAGSLTNLAKYPASTVQILGAEKALFRALKTRGNTPKYGLIFHSTFIGRAAAKNKGRISRYLANKCSIASRIDCFSEVPTSVFGEKLREQVEERLSFYETGEIPRKNLDVMKEAMVQAEEAAAEITRKLEKQEKKRLKKEKKRLAALALASSENSSSTPEECEEMSEKPKKKKKQKPQEVPQENGMEDPSISFSKPKKKKSFSKEELMSSDLEETAGSTSIPKRKKSTPKEETVNDPEEAGHRSGSKKKRKFSKEEPVSSGPEEAVGKSSSKKKKKFHKASQED

SEQ ID NO: 697 - protein, 130 aa, Homo Sapiens
MSGRGKQGGKARAKAKTRSSRAGLQFPVGRVHRLLRKGNYSERVGAGAPVYLAAVLEYLTAEILELAGNAARDNKKTRIIPRHLQLAIRNDEELNKLLGRVTIAQGGVLPNIQAVLLPKKTESHHKAKGK

SEQ ID NO: 698 - protein, 135 aa, Homo Sapiens
MATVQQLEGRWRLVDSKGFDEYMKELGVGIALRKMGAMAKPDCIITCDGKNLTIKTESTLKTTQFSCTLGEKFEETTADGRKTQTVCNFTDGALVQHQEWDGKESTITRKLKDGKLVVECVMNNVTCTRIYEKVE

SEQ ID NO: 699 - protein, 143 aa, Homo Sapiens [sequence omitted]

SEQ ID NO: 700 - protein, 361 aa, Homo Sapiens
MGNVLAASSPPAGPPPPPAPALVGLPPPPPSPPGFTLPPLGGSLGAGTSTSRSSERTPGAATASASGAAEDGACGCLPNPGTFEECHRKCKELFPIQMEGVKLTVNKGLSNHFQVNHTVALSTIGESNYHFGVTYVGTKQLSPTEAFPVLVGDMDNSGSLNAQVIHQLGPGLRSKMAIQTQQSKFVNWQVDGEYRGSDFTAAVTLGNPDVLVGSGILVAHYLQSITPCLALGGELVYHRRPGEEGTVMSLAGKYTLNNWLATVTLGQAGMHATYYHKASDQLQVGVEFEASTRMQDTSVSFGYQLDLPKANLLFKGSVDSNWIVGATLEKKLPPLPLTLALGAFLNHRKNKFQCGFGLTIG

SEQ ID NO: 701 - protein, 1166 aa, Homo Sapiens
MDGRTPRPQDAPARRKPKAKAPLPPAETKYTDVSSAADSVESTAFIMEQKENMIDKDVELSVVLPGDIIKSTTVHGSKPMMDLLIFLCAQYHLNPSSYTIDLLSAEQNHIKFKPNTPIGMLEVEKVILKPKMLDKKKPTPIIPEKTVRVVINFKKTQKTIVRVSPHASLQELAPIICSKCEFDPLHTLLLKDYQSQEPLDLTKSLNDLGLRELYAMDVNRESCQISQNLDIMKEKENKGFFSFFQRSKKKRDQTASAPATPLVNKHRPTFTRSNTISKPYISNTLPSDAPKKRRAPLPPMPASQSVPQDLAHIQERPASCIVKSMSVDETDKSPCEAGRVRAGSLQLSSMSAGNSSLRRTKRKAPSPPSKIPPHQSDENSRVTALQPVDGVPPDSASEANSPEELSSPETFHPGLSSQEQCTAPKLMEETSVFECPGTPEAAITSLTSGISSDYSLEEIDEKEELSEVPKVEAENISPKSQDIPFVSTDIINTLKNDPDSALGNGSGEFSQNSMEEKQETKSTDGQEPHSVVYDTSNGKKVVDSIRNLKSLGPNQENVQNEIIVYPENTEDNMKNGVKKTEINVEGVAKNNNIDMEVERPSNSEAHETDTAISYKENHLAASSVPDQKLNQPSAEKTKDAAIQTTPSCNSFDGKHQDHNLSDSKVEECVQTSNNNISTQHSCLSSQDSVNTSREFRSQGTLIIHSEDPLTVKDPICAHGNDDLLPPVDRIDKNSTASYLKNYPLYRQDYNPKPKPSNEITREYIPKIGMTTYKIVPPKSLEISKDWQSETIEYKDDQDMHALGKKHTHENVKETAIQTEDSAISESPEEPLPNLKPKPNLRTEHQVPSSVSSPDDAMVSPLKPAPKMTRDTGTAPFAPNLEEINNILESKFKSRASNAQAKPSSFFLQMQKRVSGHYVTSAAAKSVHAAPNPAPKELTNKEAERDMLPSPEQTLSPLSKMPHSVPQPLVEKTDDDVIGQAPAEASPPPIAPKPVTIPASQVSTQNLKTLKTFGAPRPYSSSGPSPFALAVVKRSQSFSKERTESPSASALVQPPANTEEGKTHSVNKFVDIPQLGVSDKENNSAHNEQNSQIPTPTDGPSFTVMRQSSLTFQSSDPEQMRQSLLTAIRSGEAAAKLKRVTIPSNTISVNGRSRLSHSMSPDAQDGH

SEQ ID NO: 702 - protein, 307 aa, Homo Sapiens
MSLKLQASNVTNKNDPKSINSRVFIGNLNTALVKKSDVETIFSKYGRVAGCSVHKGYAFVQYSNERHARAAVLGENGRVLAGQTLDINMAGEPKPDRPKGLKRAASAIYSGYIFDYDYYRDDFYDRLFDYRGRLSPVPVPRAVPVKRPRVTVPLVRRVKTNVPVKLFARSTAVTTSSAKIKLKSSELQAIKTELTQIKSNIDALLSRLEQIAAEQKANPDGKKKGDGGGASGGGGGGGGSGGGGSGGGGGGGSSRPPAPQENTTSEAGLPQGEARTRDDGDEEGLLTHSEEELEHSQDTDADDGALQ

SEQ ID NO: 703 - protein, 782 aa, Homo Sapiens
MAPHRPAPALLCALSLALCALSLPVRAATASRGASQAGAPQGRVPEARPNSMVVEHPEFLKAGKEPGLQIWRVEKFDLVPVPTNLYGDFFTGDAYVILKTVQLRNGNLQYDLHYWLGNECSQDESGAAAIFTVQLDDYLNGRAVQHREVQGFESATFLGYFKSGLKYKKGGVASGFKHVVPNEVVVQRLFQVKGRRVVRATEVPVSWESFNNGDCFILDLGNNIHQWCGSNSNRYERLKATQVSKGIRDNERSGRARVHVSEEGTEPEAMLQVLGPKPALPAGTEDTAKEDAANRKLAKLYKVSNGAGTMSVSLVADENPFAQGALKSEDCFILDHGKDGKIFVWKGKQANTEERKAALKTASDFITKMDYPKQTQVSVLPEGGETPLFKQFFKNWRDPDQTDGLGLSYLSSHIANVERVPFDAATLHTSTAMAAQHGMDDDGTGQKQIWRIEGSNKVPVDPATYGQFYGGDSYIILYNYRHGGRQGQIIYNWQGAQSTQDEVAASAILTAQLDEELGGTPVQSRVVQGKEPAHLMSLFGGKPMIIYKGGTSREGGQTAPASTRLFQVRANSAGATRAVEVLPKAGALNSNDAFVLKTPSAAYLWVGTGASEAEKTGAQELLRVLRAQPVQVAEGSEPDGFWEALGGKAAYRTSPRLKDKKMDAHPPRLFACSNKIGRFVIEEVPGELMQEDLATDDVMLLDTWDQVFVWVGKDSQEEEKTEALTSAKRYIETDPANRDRRTPITVVKQGFEPPSFVGWFLGWDDDYWSVDPLDRAMAELAA

SEQ ID NO: 704 - protein, 372 aa, Homo Sapiens
MSGRSGKKKMSKLSRSARAGVIFPVGRLMRYLKKGTFKYRISVGAPVYMAAVIEYLAAEILELAGNAARDNKKARIAPRHILLAVANDEELNQLLKGVTIASGGVLPRIHPELLAKKRGTKGKSETILSPPPEKRGRKATSGKKGGKKSKAAKPRTSKKSKPKDSDKEGTSNSTSEDGPGDGFTILSSKSLVLGQKLSLTQSDISHIGSMRVEGIVHPTTAEIDLKEDIGKALEKAGGKEFLETVKELRKSQGPLEVAEAAVSQSSGLAAKFVIHCHIPQWGSDKCEEQLEETIKNCLSAAEDKKLKSVAFPPFPSGRNCFPKQTAAQVTLKAISAHFDDSSASSLKNVYFLLFDSESIGIYVQEMAKLDAK

SEQ ID NO: 705 - protein, 339 aa, Homo Sapiens
MTDRSPFETDMLTLTRYVMEKGRQAKGTGELTQLLNSMLTAIKAISSAVRKAGLAHLYGIAGSVNVTGDEVKKLDVLSNSLVINMVQSSYSTCVLVSEENKDAIITAKEKRGKYVVCFDPLDGSSNIDCLASIGTIFAIYRKTSEDEPSEKDALQCGRNIVAAGYALYGSATLVALSTGQGVDLFMLDPALGEFVLVEKDVKIKKKGKIYSLNEGYAKYFDAATTEYVQKKKFPEDGSAPYGARYVGSMVADVHRTLVYGGIFLYPANQKSPKGKLRLLYECNPVAYIIEQAGGLATTGTQPVLDVKPEAIHQRVPLILGSPEDVQEYLTCVQKNQAGS

SEQ ID NO: 706 - protein, 1479 aa, Homo Sapiens
MAKRSRGPGRRCLLALVLFCAWGTLAVVAQKPGAGCPSRCLCFRTTVRCMHLLLEAVPAVAPQTSILDLRFNRIREIQPGAFRRLRNLNTLLLNNNQIKRIPSGAFEDLENLKYLYLYKNEIQSIDRQAFKGLASLEQLYLHFNQIETLDPDSFQHLPKLERLFLHNNRITHLVPGTFNHLESMKRLRLDSNTLHCDCEILWLADLLKTYAESGNAQAAAICEYPRRIQGRSVATITPEELNCERPRITSEPQDADVTSGNTVYFTCRAEGNPKPEIIWLRNNNELSMKTDSRLNLLDDGTLMIQNTQETDQGIYQCMAKNVAGEVKTQEVTLRYFGSPARPTFVIQPQNTEVLVGESVTLECSATGHPPPRISWTRGDRTPLPVDPRVNITPSGGLYIQNVVQGDSGEYACSATNNIDSVHATAFIIVQALPQFTVTPQDRVVIEGQTVDFQCEAKGNPPPVIAWTKGGSQLSVDRRHLVLSSGTLRISGVALHDQGQYECQAVNIIGSQKVVAHLTVQPRVTPVFASIPSDTTVEVGANVQLPCSSQGEPEPAITWNKDGVQVTESGKFHISPEGFLTINDVGPADAGRYECVARNTIGSASVSMVLSVNVPDVSRNGDPFVATSIVEAIATVDRAINSTRTHLFDSRPRSPNDLLALFRYPRDPYTVEQARAGEIFERTLQLIQEHVQHGLMVDLNGTSYHYNDLVSPQYLNLIANLSGCTAHRRVNNCSDMCFHQKYRTHDGTCNNLQHPMWGASLTAFERLLKSVYENGFNTPRGINPHRLYNGHALPMPRLVSTTLIGTETVTPDEQFTHMLMQWGQFLDHDLDSTVVALSQARFSDGQHCSNVCSNDPPCFSVMIPPNDSRARSGARCMFFVRSSPVCGSGMTSLLMNSVYPREQINQLTSYIDASNVYGSTEHEARSIRDLASHRGLLRQGIVQRSGKPLLPFATGPPTECMRDENESPIPCFLAGDHRANEQLGLTSMHTLWFREHNRIATELLKLNPHWDGDTIYYETRKIVGAEIQHITYQHWLPKILGEVGMRTLGEYHGYDPGINAGIFNAFATAAFRFGHTLVNPLLYRLDENFQPIAQDHLPLHKAFFSPFRIVNEGGIDPLLRGLFGVAGKMRVPSQLLNTELTERLFSMAHTVALDLAAINIQRGRDHGIPPYHDYRVYCNLSAAHTFEDLKNEIKNPEIREKLKRLYGSTLNIDLFPALVVEDLVPGSRLGPTLMCLLSTQFKRLRDGDRLWYENPGVFSPAQLTQIKQTSLARILCDNADNITRVQSDVFRVAEFPHGYGSCDEIPRVDLRVWQDCCEDCRTRGQFNAFSYHFRGRRSLEFSYQEDKPTKKTRPRKIPSVGRQGEHLSNSTSAFSTRSDASGTNDFREFVLEMQKTITDLRTQIKKLESRLSTTECVDAGGESHANNTKWKKDACTICECKDGQVTCFVEACPPATCAVPVNIPGACCPVCLQKRAEEKP

SEQ ID NO: 707 - protein, 700 aa, Homo Sapiens
MAGIAAKLAKDREAAEGLGSHDRAIKYLNQDYEALRNECLEAGTLFQDPSFPAIPSALGFKELGPYSSKTRGIEWKRPTEICADPQFIIGGATRTDICQGALGDCWLLAAIASLTLNEEILARVVPLNQSFQENYAGIFHFQFWQYGEWVEVVVDDRLPTKDGELLFVHSAEGSEFWSALLEKAYAKINGCYEALSGGATTEGFEDFTGGIAEWYELKKPPPNLFKIIQKALQKGSLLGCSIDITSAADSEAITFQKLVKGHAYSVTGAEEVESNGSLQKLIRIRNPWGEVEWTGRWNDNCPSWNTIDPEERERLTRRHEDGEFWMSFSDFLRHYSRLEICNLTPDTLTSDTYKKWKLTKMDGNWRRGSTAGGCRNYPNTFWMNPQYLIKLEEEDEDEEDGESGCTFLVGLIQKHRRRQRKMGEDMHTIGFGIYEVPEELSGQTNIHLSKNFFLTNRARERSDTFINLREVLNRFKLPPGEYILVPSTFEPNKDGDFCIRVFSEKKADYQAVDDEIEANLEEFDISEDDIDDGFRRLFAQLAGEDAEISAFELQTILRRVLAKRQDIKSDGFSIETCKIMVDMLDSDGSGKLGLKEFYILWTKIQKYQKIYREIDVDRSGTMNSYEMRKALEEAGFKMPCQLHQVIVARFADDQLIIDFDNFVRCLVRLETLFKIFKQLDPENTGTIELDLISWLCFSVL

SEQ ID NO: 708 - protein, 301 aa, Homo Sapiens
MADQPKPISPLKNLLAGGFGGVCLVFVGHPLDTVKVRLQTQPPSLPGQPPMYSGTFDCFRKTLFREGITGLYRGMAAPIIGVTPMFAVCFFGFGLGKKLQQKHPEDVLSYPQLFAAGMLSGVFTTGIMTPGERIKCLLQIQASSGESKYTGTLDCAKKLYQEFGIRGIYKGTVLTLMRDVPASGMYFMTYEWLKNIFTPEGKRVSELSAPRILVAGGIAGIFNWAVAIPPDVLKSRFQTAPPGKYPNGFRDVLRELIRDEGVTSLYKGFNAVMIRAFPANAACFLGFEVAMKFLNWATPNL

SEQ ID NO: 709 - protein, 704 aa, Homo Sapiens
MARELRALLLWGRRLRPLLRAPALAAVPGGKPILCPRRTTAQLGPRRNPAWSLQAGRLFSTQTAEDKEEPLHSIISSTESVQGSTSKHEFQAETKKLLDIVARSLYSEKEVFIRELISNASDALEKLRHKLVSDGQALPEMEIHLQTNAEKGTITIQDTGIGMTQEELVSNLGTIARSGSKAFLDALQNQAEASSKIIGQFGVGFYSAFMVADRVEVYSRSAAPGSLGYQWLSDGSGVFEIAEASGVRTGTKIIIHLKSDCKEFSSEARVRDVVTKYSNFVSFPLYLNGRRMNTLQAIWMMDPKDVREWQHEEFYRYVAQAHDKPRYTLHYKTDAPLNIRSIFYVPDMKPSMFDVSRELGSSVALYSRKVLIQTKATDILPKWLRFIRGVVDSEDIPLNLSRELLQESALIRKLRDVLQQRLIKFFIDQSKKDAEKYAKFFEDYGLFMREGIVTATEQEVKEDIAKLLRYESSALPSGQLTSLSEYASRMRAGTRNIYYLCAPNRHLAEHSPYYEAMKKKDTEVLFCFEQFDELTLLHLREFDKKKLISVETDIVVDHYKEEKFEDRSPAAECLSEKETEELMAWMRNVLGSRVTNVKVTLRLDTHPAMVTVLEMGAARHFLRMQQLAKTQEERAQLLQPTLEINPRHALIKKLNQLRASEPGLAQLLVDQIYENAMIAAGLVDDPRAMVGRLNELLVKALERH

SEQ ID NO: 710 - protein, 524 aa, Homo Sapiens
MTEDKVTGTLVFTVITAVLGSFQFGYDIGVINAPQQVIISHYRHVLGVPLDDRKAINNYVINSTDELPTISYSMNPKPTPWAEEETVAAAQLITMLWSLSVSSFAVGGMTASFFGGWLGDTLGRIKAMLVANILSLVGALLMGFSKLGPSHILIIAGRSISGLYCGLISGLVPMYIGEIAPTALRGALGTFHQLAIVTGILISQIIGLEFILGNYDLWHILLGLSGVRAILQSLLLFFCPESPRYLYIKLDEEVKAKQSLKRLRGYDDVTKDINEMRKEREEASSEQKVSIIQLFTNSSYRQPILVALMLHVAQQFSGINGIFYYSTSIFQTAGISKPVYATIGVGAVNMVFTAVSVFLVEKAGRRSLFLIGMSGMFVCAIFMSVGLVLLNKFSWMSYVSMIAIFLFVSFFEIGPGPIPWFMVAEFFSQGPRPAALAIAAFSNWTCNFIVALCFQYIADFCGPYVFFLFAGVLLAFTLFTFFKVPETKGKSFEEIAAEFQKKSGSAHRPKAAVEMKFLGATETV

SEQ ID NO: 711 - protein, 346 aa, Homo Sapiens
MDWVMKHNGPNDASDGTVRLRGLPFGCSKEEIVQFFQGLEIVPNGITLTMDYQGRSTGEAFVQFASKEIAENALGKHKERIGHRYIEIFRSSRSEIKGFYDPPRRLLGQRPGPYDRPIGGRGGYYGAGRGSMYDRMRRGGDGYDGGYGGFDDYGGYNNYGYGNDGFDDRMRDGRGMGGHGYGGAGDASSGFHGGHFVHMRGLPFRATENDIANFFSPLNPIRVHIDIGADGRATGEADVEFVTHEDAVAAMSKDKNNMQHRYIELFLNSTPGGGSGMGGSGMGGYGRDGMDNQGGYGSVGRMGMGNNYSGGYGTPDGLGGYGRGGGGSGGYYGQGGMSGGGWRGMY

SEQ ID NO: 712 - protein, 577 aa, Homo Sapiens
MPKTISVRVTTMDAELEFAIQPNTTGKQLFDQVVKTIGLREVWFFGLQYQDTKGFSTWLKLNKKVTAQDVRKESPLLFKFRAKFYPEDVSEELIQDITQRLFFLQVKEGILNDDIYCPPETAVLLASYAVQSKYGDFNKEVHKSGYLAGDKLLPQRVLEQHKLNKDQWEERIQVWHEEHRGMLREDAVLEYLKIAQDLEMYGVNYFSIKNKKGSELWLGVDALGLNIYEQNDRLTPKIGFPWSEIRNISFNDKKFVIKPIDKKAPDFVFYAPRLRINKRILALCMGNHELYMRRRKPDTIEVQQMKAQAREEKHQKQMERAMLENEKKKREMAEKEKEKIEREKEELMERLKQIEEQTKKAQQELEEQTRRALELEQERKRAQSEAEKLAKERQEAEEAKEALLQASRDQKKTQEQLALEMAELTARISQLEMARQKKESEAVEWQQKAQMVQEDLEKTRAELKTAMSTPHVAEPAENEQDEQDENGAEASADLRADAMAKDRSEEERTTEAEKNERVQKHLKALTSELANARDESKKTANDMIHAENMRLGRDKYKTLRQIRQGNTKQRIDEFESM

SEQ ID NO: 713 - protein, 318 aa, Homo Sapiens
MPKRGKKGAVAEDGDELRTEPEAKKSKTAAKKNDKEAAGEGPALYEDPPDQKTSPSGKPATLKICSWNVDGLRAWIKKKGLDWVKEEAPDILCLQETKCSENKLPAELQELPGLSHQYWSAPSDKEGYSGVGLLSRQCPLKVSYGIGDEEHDQEGRVIVAEFDSFVLVTAYVPNAGRGLVRLEYRQRWDEAFRKFLKGLASRKPLVLCGDLNVAHEEIDLRNPKGNKKNAGFTPQERQGFGELLQAVPLADSFRHLYPNTPYAYTFWTYMMNARSKNVGWRLDYFLLSHSLLPALCDSKIRSKALGSDHCPITLYLAL

SEQ ID NO: 714 - protein, 437 aa, Homo Sapiens
MASVAVDPQPSVVTRVVNLPLVSSTYDLMSSAYLSTKDQYPYLKSVCEMAENGVKTITSVAMTSALPIIQKLEPQIAVANTYACKGLDRIEERLPILNQPSTQIVANAKGAVTGAKDAVTTTVTGAKDSVASTITGVMDKTKGAVTGSVEKTKSVVSGSINTVLGSRMMQLVSSGVENALTKSELLVEQYLPLTEEELEKEAKKVEGFDLVQKPSYYVRLGSLSTKLHSRAYQQALSRVKEAKQKSQQTISQLHSTVHLIEFARKNVYSANQKIQDAQDKLYLSWVEWKRSIGYDDTDESHCAEHIESRTLAIARNLTQQLQTTCHTLLSNIQGVPQNIQDQAKHMGVMAGDIYSVFRNAASFKEVSDSLLTSSKGQLQKMKESLDDVMDYLVNNTPLNWLVGPFYPQLTESQNAQDQGAEMDKSSQETQRSEHKTH

SEQ ID NO: 715 - protein, 296 aa, Homo Sapiens [sequence omitted]

SEQ ID NO: 716 - protein, 216 aa, Homo Sapiens
MQAGKPILYSYFRSSCSWRVRIALALKGIDYKTVPINLIKDRGQQFSKDFQALNPMKQVPTLKIDGITIHQSLAIIEYLEEMRPTPRLLPQDPKKRASVRMISDLIAGGIQPLQNLSVLKQVGEEMQLTWAQNAITCGFNALEQILQSTAGIYCVGDEVTMADLCLVPQVANAERFKVDLTPYPTISSINKRLLVLEAFQVSHPCRQPDTPTELRA

SEQ ID NO: 717 - protein, 400 aa, Homo Sapiens
MTSYSYRQSSATSSFGGLGGGSVRFGPGVAFRAPSIHGGSGGRGVSVSSARFVSSSSSGAYGGGYGGVLTASDGLLAGNEKLTMQNLNDRLASYLDKVRALEAANGELEVKIRDWYQKQGPGPSRDYSHYYTTIQDLRDKILGATIENSRIVLQIDNARLAADDFRTKFETEQALRMSVEADINGLRRVLDELTLARTDLEMQIEGLKEELAYLKKNHEEEISTLRGQVGGQVSVEVDSAPGTDLAKILSDMRSQYEVMAEQNRKDAEAWFTSRTEELNREVAGHTEQLQMSRSEVTDLRRTLQGLEIELQSQLSMKAALEDTLAETEARFGAQLAHIQALISGIEAQLGDVRADSERQNQEYQRLMDIKSRLEQEIATYRSLLEGQEDHYNNLSASKVL

SEQ ID NO: 718 - protein, 406 aa, Homo Sapiens
MQLFLLLCLVLLSPQGASLHRHHPREMKKRVEDLHVGATVAPSSRRDFTFDLYRALASAAPSQSIFFSPVSISMSLAMLSLGAGSSTKMQILEGLGLNLQKSSEKELHRGFQQLLQELNQPRDGFQLSLGNALFTDLVVDLQDTFVSAMKTLYLADTFPTNFRDSAGAMKQINDYVAKQTKGKIVDLLKNLDSNAVVIMVNYIFFKAKWETSFNHKGTQEQDFYVTSETVVRVPMMSREDQYHYLLDRNLSCRVVGVPYQGNATALFILPSEGKMQQVENGLSEKTLRKWLKMFKKRQLELYLPKFSIEGSYQLEKVLPSLGISNVFTSHADLSGISNHSNIQVSEMVHKAVVEVDESGTRAAAATGTIFTFRSARLNSQRLVFNRPFLMFIVDNNILFLGKVNRP

SEQ ID NO: 719 - protein, 592 aa, Homo Sapiens
MASEIHMTGPMCLIENTNGRLMANPEALKILSAITQPMVVVAIVGLYRTGKSYLMNKLAGKKKGFSLGSTVQSHTKGIWMWCVPHPKKPGHILVLLDTEGLGDVEKGDNQNDSWIFALAVLLSSTFVYNSIGTINQQAMDQLYYVTELTHRIRSKSSPDENENEVEDSADFVSFFPDFVWTLRDFSLDLEADGQPLTPDEYLTYSLKLKKGTSQKDETFNLPRLCIRKFFPKKKCFVFDRPVHRRKLAQLEKLQDEELDPEFVQQVADFCSYIFSNSKTKTLSGGIQVNGPRLESLVLTYVNAISSGDLPCMENAVLALAQIENSAAVQKAIAHYEQQMGQKVQLPTETLQELLDLHRDSEREAIEVFIRSSFKDVDHLFQKELAAQLEKKRDDFCKQNQEASSDRCSALLQVIFSPLEEEVKAGIYSKPGGYRLFVQKLQDLKKKYYEEPRKGIQAEEILQTYLKSKESMTDAILQTDQTLTEKEKEIEVERVKAESAQASAKMLQEMQRKNEQMMEQKERSYQEHLKQLTEKMENDRVQLLKEQERTLALKLQEQEQLLKEGFQKESRIMKNEIQDLQTKMRRRKACTIS

SEQ ID NO: 720 - protein, 166 aa, Homo Sapiens
MASGVAVSDGVIKVFNDMKVRKSSTPEEVKKRKKAVLFCLSEDKKNIILEEGKEILVGDVGQTVDDPYATFVKMLPDKDCRYALYDATYETKESKKEDLVFIFWAPESAPLKSKMIYASSKDAIKKKLTGIKHELQANCYEEVKDRCTLAEKLGGSAVISLEGKPL

SEQ ID NO: 721 - protein, 295 aa, Homo Sapiens
MATKCGNCGPGYSTPLEAMKGTEAPDYLATVDVDPKSPQYCQVIHRLPMPNLKDELHHSGWNTCSSCFGDSTKSRTKLVLPSLISSRIYVVDVGSEPRAPKLHKVIEPKDIHAKCELAFLHTSHCLASGEVMISSLGDVKGNGKGGFVLLDGETFEVKGTWERPGGAAPLGYDFWYQPRHNVMISTEWAAPNVLRDGFNPADVEAGLYGSHLYVWDWQRHEIVQTLSLKDGLIPLEIRFLHNPDAAQGFVGCALSSTIQRFYKNEGGTWSVEKVIQVPPKKVKGWLLPEMPGLIT

SEQ ID NO: 722 - protein, 523 aa, Homo Sapiens
MAAVGRVGSFGSSPPGLSSTYTGGPLGNEIASGNGGAAAGDDEDGQNLWSCILSEVSTRSRSKLPAGKNVLLLGEDGAGKTSLIRKIQGIEEYKKGRGLEYLYLNVHDEDRDDQTRCNVWILDGDLYHKGLLKFSLDAVSLKDTLVMLVVDMSKPWTALDSLQKWASVVREHVDKLKIPPEEMKQMEQKLIRDFQEYVEPGEDFPASPQRRNTASQEDKDDSVVLPLGADTLTHNLGIPVLVVCTKCDAISVLEKEHDYRDEHFDFIQSHIRKFCLQYGAALIYTSVKENKNIDLVYKYIVQKLYGFPYKIPAVVVEKDAVFIPAGWDNDKKIGILHENFQTLKAEDNFEDIITKPPVRKFVHEKEIMAEDDQVFLMKLQSLLAKQPPTAAGRPVDASPRVPGGSPRTPNRSVSSNVASVSPIPAGSKKIDPNMKAGATSEGVLANFFNSLLSKKTGSPGGPGVSGGSPAGGAGGGSSGLPPSTKKSGQKPVLDVHAELDRITRKPVTVSPTTPTSPTEGEAS

SEQ ID NO: 723 - protein, 347 aa, Homo Sapiens
MSASQDSRSRDNGPDGMEPEGVIESNWNEIVDSFDDMNLSESLLRGIYAYGFEKPSAIQQRAILPCIKGYDVIAQAQSGTGKTATFAISILQQIELDLKATQALVLAPTRELAQQIQKVVMALGDYMGASCHACIGGTNVRAEVQKLQMEAPHIIVGTPGRVFDMLNRRYLSPKYIKMFVLDEADEMLSRGFKDQIYDIFQKLNSNTQVVLLSATMPSDVLEVTKKFMRDPIRILVKKEELTLEGIRQFYINVEREEWKLDTLCDLYETLTITQAVIFINTRRKVDWLTEKMHARDFTVSAMHGDMDQKERDVIMREFRSGSSRVLITTDLLGKLYPQNRSRWTVWP

SEQ ID NO: 724 - protein, 622 aa, Homo Sapiens
MAHVRGLQLPGCLALAALCSLVHSQHVFLAPQQARSLLQRVRRANTFLEEVRKGNLERECVEETCSYEEAFEALESSTATDVFWAKYTACETARTPRDKLAACLEGNCAEGLGTNYRGHVNITRSGIECQLWRSRYPHKPEINSTTHPGADLQENFCRNPDSSTTGPWCYTTDPTVRRQECSIPVCGQDQVTVAMTPRSEGSSVNLSPPLEQCVPDRGQQYQGRLAVTTHGLPCLAWASAQAKALSKHQDFNSAVQLVENFCRNPDGDEEGVWCYVAGKPGDFGYCDLNYCEEAVEEETGDGLDEDSDRAIEGRTATSEYQTFFNPRTFGSGEADCGLRPLFEKKSLEDKTERELLESYIDGRIVEGSDAEIGMSPWQVMLFRKSPQELLCGASLISDRWVLTAAHCLLYPPWDKNFTENDLLVRIGKHSRTRYERNIEKISMLEKIYIHPRYNWRENLDRDIALMKLKKPVAFSDYIHPVCLPDRETAASLLQAGYKGRVTGWGNLKETWTANVGKGQPSVLQVVNLPIVERPVCKDSTRIRITDNMFCAGYKPDEGKRGDACEGDSGGPFVMKSPFNNRWYQMGIVSWGEGCDRDGKYGFYTHVFRLKKWIQKVIDQFGE

SEQ ID NO: 725 - protein, 152 aa, Homo Sapiens
MANCERTFIAIKPDGVQRGLVGEIIKRFEQKGFRLVGLKFMQASEDLLKEHYVDLKDRPFFAGLVKYMHSGPVVAMVWEGLNVVKTGRVMLGETNPADSKPGTIRGDFCIQVGRNIIHGSDSVESAEKEIGLWFHPEELVDYTSCAQNWIYE

SEQ ID NO: 726 - protein, 417 aa, Homo Sapiens
MGRRRAPELYRAPFPLYALQVDPSTGLLIAAGGGGAAKTGIKNGVHFLQLELINGRLSASLLHSHDTETRATMNLALAGDILAAGQDAHCQLLRFQAHQQQGNKAEKAGSKEQGPRQRKGAAPAEKKCGAETQHEGLELRVENLQAVQTDFSSDPLQKVVCFNHDNTLLATGGTDGYVRVWKVPSLEKVLEFKAHEGEIEDLALGPDGKLVTVGRDLKASVWQKDQLVTQLHWQENGPTFSSTPYRYQACRFGQVPDQPAGLRLFTVQIPHKRLRQPPPCYLTAWDGSNFLPLRTKSCGHEVVSCLDVSESGTFLGLGTVTGSVAIYIAFSLQCLYYVREAHGIVVTDVAFLPEKGRGPELLGSHETALFSVAVDSRCQLHLLPSRRSVPVWLLLLLCVGLIIVTILLLQSAFPGFL

SEQ ID NO: 727 - protein, 573 aa, Homo Sapiens
MARAVGPERRLLAVYTGGTIGMRSELGVLVPGTGLAAILRTLPMFHDEEHARARGLSEDTLVLPPASRNQRILYTVLECQPLFDSSDMTIAEWVCLAQTIKRHYEQYHGFVVIHGTDTMAFAASMLSFMLENLQKTVILTGAQVPIHALWSDGRENLLGALLMAGQYVIPEVCLFFQNQLFRGNRATKVDARRFAAFCSPNLLPLATVGADITINRELVRKVDGKAGLVVHSSMEQDVGLLRLYPGIPAALVRAFLQPPLKGVVMETFGSGNGPTKPDLLQELRVATERGLVIVNCTHCLQGAVTTDYAAGMAMAGAGVISGFDMTSEAALAKLSYVLGQPGLSLDVRKELLTKDLRGEMTPPSVEERRPSLQGNTLGGGVSWLLSLSGSQEADALRNALVPSLACAAAHAGDVEALQALVELGSDLGLVDFNGQTPLHAAARGGHTEAVTMLLQRGVDVNTRDTDGFSPLLLAVRGRHPGVIGLLREAGASLSTQELEEAGTELCRLAYRADLEGLQVWWQAGADLGQPGYDGHSALHVAEAAGNLAVVAFLQSLEGAVGAQAPCPEVLPGV

SEQ ID NO: 728 - protein, 1262 aa, Homo Sapiens
MLQQVPENINFPAEEEKILEFWTEFNCFQECLKQSKHKPKFTFYDGPPFATGLPHYGHILAGTIKDIVTRYAHQSGFHVDRRFGWDCHGLPVEYEIDKTLGIRGPEDVAKMGITEYNNQCRAIVMRYSAEWKSTVSRLGRWIDFDNDYKTLYPQFMESVWWVFKQLYDKGLVYRGVKVMPFSTACNTPLSNFESHQNYKDVQDPSVFVTFPLEEDETVSLVAWTTTPWTLPSNLAVCVNPEMQYVKIKDVARGRLLILMEARLSALYKLESDYEILERFPGAYLKGKKYRPLFDYFLKCKENGAFTVLVDNYVKEEEGTGVVHQAPYFGAEDYRVCMDFNIIRKDSLPVCPVDASGCFTTEVTDFAGQYVKDADKSIIRTLKEQGRLLVATTFTHSYPFCWRSDTPLIYKAVPSWFVRVENMVDQLLRNNDLCYWVPELVREKRFGNWLKDARDWTISRNRYWGTPIPLWVSDDFEEVVCIGSVAELEELSGAKISDLHRESVDHLTIPSRCGKGSLHRISEVFDCWFESGSMPYAQVHYPFENKREFEDAFPADFIAEGIDQTRGWFYTLLVLATALFGQPPFKNVIVNGLVLASDGQKMSKRKKNYPDPVSIIQKYGADALRLYLINSPVVRAENLRFKEEGVRDVLKDVLLPWYNAYRFLIQNVLRLQKEEEIEFLYNENTVRESPNITDRWILSFMQSLIGFFETEMAAYRLYTVVPRLVKFVDILTNWYVRMNRRRLKGENGMEDCVMALETLFSVLLSLCRLMAPYTPFLTELMYQNLKVLIDPVSVQDKDTLSIHYLMLPRVREELIDKKTESAVSQMQSVIELGRVIRDRKTIPIKYPLKEIVVIHQDPEALKDIKSLEKYIIEELNVRKVTLSTDKNKYGIRLRAEPDHMVLGKRLKGAFKAVMTSIKQLSSEELEQFQKTGTIVVEGHELHDEDIRLMYTFDQATGGTAQFEAHSDAQALVLLDVTPDQSMVDEGMAREVINRIQKLRKKCNLVPTDEITVYYKAKSEGTYLNSVIESHTEFIFTTIKAPLKPYPVSPSDKVLIQEKTQLKGSELEITLTRGSSLPGPACAYVNLNICANGSEQGGVLLLENPKGDNRLDLLKLKSVVTSIFGVKNTELAVFHDETEIQNQTDLLSLSGKTLCVTAGSAPSLINSSSTLLCQYINLQLLNAKPQECLMGTVGTLLLENPLGQNGLTHQGLLYEAAKVFGLRSRKLKLFLNETQTQEITEDIPVKTLNMKTVYVSVLPTTADF

SEQ ID NO: 729 - protein, 572 aa, Homo Sapiens
MSYQGKKNIPRITSDRLLIKGGKIVNDDQSFYADIYMEDGLIKQIGENLIVPGGVKTIEAHSRMVIPGGIDVHTRFQMPDQGMTSADDFFQGTKAALAGGTTMIIDHVVPEPGTSLLAAFDQWREWADSKSCCDYSLHVDISEWHKGIQEEMEALVKDHGVNSFLVYMAFKDRFQLTDCQIYEVLSVIRDIGAIAQVHAENGDIIAEEQQRILDLGITGPEGHVLSRPEEVEAEAVNRAITIANQTNCPLYITKVMSKSSAEVIAQARKKGTVVYGEPITASLGTDGSHYWSKNWAKAAAFVTSPPLSPDPTTPDFLNSLLSCGDLQVTGSAHCTFNTAQKAVGKDNFTLIPEGTNGTEERMSVIWDKAVVTGKMDENQFVAVTSTNAAKVFNLYPRKGRIAVGSDADLVIWDPDSVKTISAKTHNSSLEYNIFEGMECRGSPLVVISQGKIVLEDGTLHVTEGSGRYIPRKPFPDFVYKRIKARSRLAELRGVPRGLYDGPVCEVSVTPKTVTPASSAKTSPAKQQAPPVRNLHQSGFSLSGAQIDDNIPRRTTQRIVAPPGGRANITSLG

SEQ ID NO: 730 - protein, 893 aa, Homo Sapiens
MATEEFIIRIPPYHYIHVLDQNSNVSRVEVGPKTYIRQDNERVLFAPMRMVTVPPRHYCTVANPVSRDAQGLVLFDVTGQVRLRHADLEIRLAQDPFPLYPGEVLEKDITPLQVVLPNTALHLKALLDFEDKDGDKVVAGDEWLFEGPGTYIPRKEVEVVEIIQATIIRQNQALRLRARKECWDRDGKERVTGEEWLVTTVGAYLPAVFEEVLDLVDAVILTEKTALHLRARRNFRDFRGVSRRTGEEWLVTVQDTEAHVPDVHEEVLGVVPITTLGPHNYCVILDPVGPDGKNQLGQKRVVKGEKSFFLQPGEQLEQGIQDVYVLSEQQGLLLRALQPLEEGEDEEKVSHQAGDHWLIRGPLEYVPSAKVEVVEERQAIPLDENEGIYVQDVKTGKVRAVIGSTYMLTQDEVLWEKELPPGVEELLNKGQDPLADRGEKDTAKSLQPLAPRNKTRVVSYRVPHNAAVQVYDYREKRARVVFGPELVSLGPEEQFTVLSLSAGRPKRPHARRALCLLLGPDFFTDVITIETADHARLQLQLAYNWHFEVNDRKDPQETAKLFSVPDFVGDACKAIASRVRGAVASVTFDDFHKNSARIIRTAVFGFETSEAKGPDGMALPRPRDQAVFPQNGLVVSSVDVQSVEPVDQRTRDALQRSVQLAIEITTNSQEAAAKHEAQRLEQEARGRLERQKILDQSEAEKARKELLELEALSMAVESTGTAKAEAESRAEAARIEGEGSVLQAKLKAQALAIETEAELQRVQKVRELELVYARAQLELEVSKAQQLAEVEVKKFKQMTEAIGPSTIRDLAVAGPEMQVKLLQSLGLKSTLITDGSTPINLFNTAFGLLGMGPEGQPLGRRVASGPSPGEGISPQSAQAPQAPGDNHVVPVLR

SEQ ID NO: 731 - protein, 603 aa, Homo Sapiens
MVKLAKAGKNQGDPKKMAPPPKEVEEDSEDEEMSEDEEDDEDDDDDEEDDSEEEAMETTPAKGKKAAKVVPVKAKGAKNGKNAKKEDSDEEEDDDSEEDEEDDEDEDEDEDEIEPAAMKAAAAAPASEDEDDEDDEDDEDDDDDEDDEDDDEDDEEEEEEEEEEPVKEAPGKRKKEMAKQKAAPEAKKQKVEGTEPTTAFNLFVGNLNFNKSAPELKTGISDVFAKNDLAVVDVRIGMTRKFGYVDFESAEDLEKALELTGLKVFGNEIKLEKPKGKDSKKERDARTLLAKNLPYKVTQDELKEVFEDAAEIRLVSKDGNSKGIAYIEFKTEADAEKTFEEKQGTEIDGRSISLYYTGEKGQNQDYRGGKNSTWSGESKTLVLSNLSYSATEETLQEVFEKATFIKVPQNQNGKSKGYAFIEFASFEDAKEALNSCNKREIEGRAIRLELQGPRGSPNARSQPSKTLFVKGLSEDTTEETLKESFDGSVRARIVTDRETGSSKGFGFVDFNSEEDAKAAKEAMEDGEIDGNKVTLDWAKPKGEGGFGGRGGGRGGFGGRGGGRGGRGGFGGRGRGGFGGRGGFRGGRGGGGDHKPQGKKTKFE

SEQ ID NO: 732 - protein, 1310 aa, Homo Sapiens
MLLNGDCPESLKKEAAAAEPPRENGLDEAGPGDETTGQEVIVIQDTGFSVKILAPGIEPFSLQVSPQEMVQEIHQVLMDREDTCHRTCFSLHLDGNVLDHFSELRSVEGLQEGSVLRVVEEPYTVREARIHVRHVRDLLKSLDPSDAFNGVDCNSLSFLSVFTDGDLGDSGKRKKGLEMDPIDCTPPEYILPGSRERPLCPLQPQNRDWKPLQCLKVLTMSGWNPPPGNRKMHGDLMYLFVITAEDRQVSITASTRGFYLNQSTAYHFNPKPASPRFLSHSLVELLNQISPTFKKNFAVLQKKRVQRHPFERIATPFQVYSWTAPQAEHAMDCVRAEDAYTSRLGYEEHIPGQTRDWNEELQTTRELPRKNLPERLLRERAIFKVHSDFTAAATRGAMAVIDGNVMAINPSEETKMQMFIWNNIFFSLGFDVRDHYKDFGGDVAAYVAPTNDLNGVRTYNAVDVEGLYTLGTVVVDYRGYRVTAQSIIPGILERDQEQSVIYGSIDFGKTVVSHPRYLELLERTSRPLKILRHQVLNDRDEEVELCSSVECKGIIGNDGRHYILDLLRTFPPDLNFLPVPGEELPEECARAGFPRAHRHKLCCLRQELVDAFVEHRYLLFMKLAALQLMQQNASQLETPSSLENGGPSSLESKSEDPPGQEAGSEEEGSSASGLAKVKELAETIAADDGTDPRSREVIRNACKAVGSISSTAFDIRFNPDIFSPGRVRFPESCQDEVRDQKQLLKDAAAFLLSCQIPGLVKDCMEHAVLPVDGATLAEVMRQRGINMRYLGKVLELVLRSPARHQLDHVFKIGIGELITRSAKHIFKTYLQGVELSGLSAAISHFLNCFLSSYPNPVAHLPADELVSKKRNKRRKNRPPGAADNTAWAVMTPQELWKNICQEAKNYFDFDLECETVDQAVETYGLQKITLLREISLKTGIQVLLKEYSFDSRHKPAFTEEDVLNIFPVVKHVNPKASDAFHFFQSGQAKVQQGFLKEGCELINEALNLFNNVYGAMHVETCACLRLLARLHYIMGDYAEALSNQQKAVLMSERVMGTEHPNTIQEYMHLALYCFASSQLSTALSLLYRARYLMLLVFGEDHPEMALLDNNIGLVLHGVMEYDLSLRFLENALAVSTKYHGPKALKVALSHHLVARVYESKAEFRSALQHEKEGYTIYKTQLGEDHEKTKESSEYLKCLTQQAVALQRTMNEIYRNGSSANIPPLKFTAPSMASVLEQLNVINGILFIPLSQKDLENLKAEVARRHQLQEASRNRDRAEEPMATEPAPAGAPGDLGSQPPAAKDPSPSVQG

SEQ ID NO: 733 - protein, 245 aa, Homo Sapiens
MDKNELVQKAKLAEQAERYDDMAACMKSVTEQGAELSNEERNLLSVAYKNVVGARRSSWRVVSSIEQKTEGAEKKQQMAREYREKIETELRDICNDVLSLLEKFLIPNASQAESKVFYLKMKGDYYRYLAEVAAGDDKKGIVDQSQQAYQEAFEISKKEMQPTHPIRLGLALNFSVFYYEILNSPEKACSLAKTAFDEAIAELDTLSEESYKDSTLIMQLLRDNLTLWTSDTQGDEAEAGEGGEN

SEQ ID NO: 734 - protein, 1072 aa, Homo Sapiens
MGVQGFQDYIEKHCPSAVVPVELQKLARGSLVGGGRQRPPQTPLRLLVDADNCLHRLYGGFYTDWVSGGQWNHMLGYLAALAKACFGGNIELFVFFNGALEKARLHEWVKRQGNERQTAQQIVSHVQNKGTPPPKVWFLPPVCMAHCIRLALIRFHVKVAQSIEDHHQEVIGFCRENGFHGLVAYDSDYALCNIPYYFSAHALKLSRNGKSLTTSQYLMHEVAKQLDLNPNRFPIFAALLGNHILPDEDLASFHWSLLGPEHPLASLKVRAHQLVLPPCDVVIKAVADYVRNIQDTSDLDAIAKDVFQHSQSRTDDKVIRFKRAIGYYSATSKPMSFHPPHYLAARPGPFGMPGMVPPHVPPQMLNIPQTSLQAKPVAPQVPSPGGAPGQGPYPYSLSEPAPLTLDTSGKNLTEQNSYSNIPHEGKHTPLYERSSPINPAQSGSPNHVDSAYFPGSSTSSSSDNDEGSGGATNHISGNKIGWEKTGSHSEPQARGDPGDQTKAEGSSTASSGSQLAEGKGSQMGTVQPIPCLLSMPTRNHMDITTPPLPPVAPEVLRVAEHRHKKGLMYPYIFHVLTKGEIKIAVSIEDEANKDLPPAALLYRPVRQYVYGVLFSLAESRKKTERLAFRKNRLPPEFSPVIIKEWAAYKGKSPQTPELVEALAFREWTCPNLKRLWLGKAVEDKNRRMRAFLACMRSDTPAMLNPANVPTHLMVLCCVLRYMVQWPGARILRRQELDAFLAQALSPKLYEPDQLQELKIENLDPRGIQLSALFMSGVDMALFANDACGQPIPWEHCCPWMYFDGKLFQSKLLKASREKTPLIDLCDGQADQAAKVEKMRQSVLEGLSFSRQSHTLPFPPPPALPFYPASAYPRHFGPVPPSQGRGRGFAGVQPIPSQGGKLEIAGTVVGHWAGSRRGRGGRGPFPLQVVSVGGPARGRPRGVISTPVIRTFGRGGRYYGRGYKNQAAIQGRPPYAASAEEVAKELKSKSGESKSSAMSSDGSLAENGVMAEEKPAPQMNGSTGDARAPSHSESALNNDSKTCNTNPHLNALSTDSACRREAALEAAVLNKEE

SEQ ID NO: 735 - protein, 4684 aa, Homo Sapiens
MVAGMLMPRDQLRAIYEVLFREGVMVAKKDRRPRSLHPHVPGVTNLQVMRAMASLRARGLVRETFAWCHFYWYLTNEGIAHLRQYLHLPPEIVPASLQRVRRPVAMVMPARRTPHVQAVQGPLGSPPKRGPLPTEEQRVYRRKELEEVSPETPVVPATTQRTLARPGPEPAPATDERDRVQKKTFTKWVNKHLIKAQRHISDLYEDLRDGHNLISLLEVLSGDSLPREKGRMRFHKLQNVQIALDYLRHRQVKLVNIRNDDIADGNPKLTLGLIWTIILHFQISDIQVSGQSEDMTAKEKLLLWSQRMVEGYQGLRCDNFTSSWRDGRLFNAIIHRHKPLLIDMNKVYRQTNLENLDQAFSVAERDLGVTRLLDPEDVDVPQPDEKSIITYVSSLYDAMPRVPDVQDGVRANELQLRWQEYRELVLLLLQWMRHHTAAFEERRFPSSFEEIEILWSQFLKFKEMELPAKEADKNRSKGIYQSLEGAVQAGQLKVPPGYHPLDVEKEWGKLHVAILEREKQLRSEFERLECLQRIVTKLQMEAGLCEEQLNQADALLQSDVRLLAAGKVPQRAGEVERDLDKADSMIRLLFNDVQTLKDGRHPQGEQMYRRVYRLHERLVAIRTEYNLRLKAGVAAPATQVAQVTLQSVQRRPELEDSTLRYLQDLLAWVEENQHRVDGAEWGVDLPSVEAQLGSHRGLHQSIEEFRAKIERARSDEGQLSPATRGAYRDCLGRLDLQYAKLLNSSKARLRSLESLHSFVAAATKELMWLNEKEEEEVGFDWSDRNTNMTAKKESYSALMRELELKEKKIKELQNAGDRLLREDHPARPTVESFQAALQTQWSWMLQLCCCIEAHLKENAAYFQFFSDVREAEGQLQKLQEALRRKYSCDRSATVTRLEDLLQDAQDEKEQLNEYKGHLSGLAKRAKAVVQLKPRHPAHPMRGRLPLLAVCDYKQVEVTVHKGDECQLVGPAQPSHWKVLSSSGSEAAVPSVCFLVPPPNQEAQEAVTRLEAQHQALVTLWHQLHVDMKSLLAWQSLRRDVQLIRSWSLATFRTLKPEEQRQALHSLELHYQAFLRDSQDAGGFGPEDRLMAEREYGSCSHHYQQLLQSLEQGAQEESRCQRCISELKDIRLQLEACETRTVHRLRLPLDKEPARECAQRIAEQQKAQAEVEGLGKGVARLSAEAEKVLALPEPSPAAPTLRSELELTLGKLEQVRSLSAIYLEKLKTISLVIRGTQGAEEVLRAHEEQLKEAQAVPATLPELEATKASLKKLRAQAEAQQPTFDALRDELRGAQEVGERLQQRHGERDVEVERWRERVAQLLERWQAVLAQTDVRQRELEQLGRQLRYYRESADPLGAWLQDARRRQEQIQAMPLADSQAVREQLRQEQALLEEIERHGEKVEECQRFAKQYINAIKDYELQLVTYKAQLEPVASPAKKPKVQSGSESVIQEYVDLRTHYSELTTLTSQYIKFISETLRRMEEEERLAEQQRAEERERLAEVEAALEKQRQLAEAHAQAKAQAEREAKELQQRMQEEVVRREEAAVDAQQQKRSIQEELQQLRQSSEAEIQAKARQAEAAERSRLRIEEEIRVVRLQLEATERQRGGAEGELQALRARAEEAEAQKRQAQEEAERLRRQVQDESQRKRQAEVELASRVKAEAEAAREKQRALQALEELRLQAEEAERRLRQAEVERARQVQVALETAQRSAEAELQSKRASFAEKTAQLERSLQEEHVAVAQLREEAERRAQQQAEAERAREEAERELERWQLKANEALRLRLQAEEVAQQKSLAQAEAEKQKEEAEREARRRGKAEEQAVRQRELAEQELEKQRQLAEGTAQQRLAAEQELIRLRAETEQGEQQRQLLEEELARLQREAAAATQKRQELEAELAKVRAEMEVLLASKARAEEESRSTSEKSKQRLEAEAGRFRELAEEAARLRALAEEAKRQRQLAEEDAARQRAEAERVLAEKLAAIGEATRLKTEAEIALKEKEAENERLRRLAEDEAFQRRRLEEQAAQHKADIEERLAQLRKASDSELERQKGLVEDTLRQRRQVEEEILALKASFEKAAAGKAELELELGRIRSNAEDTLRSKEQAELEAARQRQLAAEEERRRREAEERVQKSLAAEEEAARQRKAALEEVERLKAKVEEARRLRERAEQESARQLQLAQEAAQKRLQAEEKAHAFAVQQKEQELQQTLQQEQSVLDQLRGEAEAARRAAEEAEEARVQAEREAAQSRRQVEEAERLKQSAEEQAQARAQAQAAAEKLRKEAEQEAARRAQAEQAALRQKQAADAEMEKHKKFAEQTLRQKAQVEQELTTLRLQLEETDHQKNLLDEELQRLKAEATEAARQRSQVEEELFSVRVQMEELSKLKARIEAENRALILRDKDNTQRFLQEEAEKMKQVAEEAARLSVAAQEAARLRQLAEEDLAQQRALAEKMLKEKMQAVQEATRLKAEAELLQQQKELAQEQARRLQEDKEQMAQQLAEETQGFQRTLEAERQRQLEMSAEAERLKLRVAEMSRAQARAEEDAQRFRKQAEEIGEKLHRTELATQEKVTLVQTLEIQRQQSDHDAERLREAIAELEREKEKLQQEAKLLQLKSEEMQTVQQEQLLQETQALQQSFLSEKDSLLQRERFIEQEKAKLEQLFQDEVAKAQQLREEQQRQQQQMEQERQRLVASMEEARRRQHEAEEGVRRKQEELQQLEQQRRQQEELLAEENQRLREQLQLLEEQHRAALAHSEEVTASQVAATKTLPNGRDALDGPAAEAEPEHSFDGLRRKVSAQRLQEAGILSAEELQRLAQGHTTVDELARREDVRHYLQGRSSIAGLLLKATNEKLSVYAALQRQLLSPGTALILLEAQAASGFLLDPVRNRRLTVNEAVKEGVVGPELHHKLLSAERAVTGYKDPYTGQQISLFQAMQKGLIVREHGIRLLEAQIATGGVIDPVHSHRVPVDVAYRRGYFDEEMNRVLADPSDDTKGFFDPNTHENLTYLQLLERCVEDPETGLCLLPLTDKAAKGGELVYTDSEARDVFEKATVSAPFGKFQGKTVTIWEIINSEYFTAEQRRDLLRQFRTGRITVEKIIKIIITVVEEQEQKGRLCFEGLRSLVPAAELLESRVIDRELYQQLQRGERSVRDVAEVDTVRRALRGANVIAGVWLEEAGQKLSIYNALKKDLLPSDMAVALLEAQAGTGHIIDPATSARLTVDEAVRAGLVGPEFHEKLLSAEKAVTGYRDPYTGQSVSLFQALKKGLIPREQGLRLLDAQLSTGGIVDPSKSHRVPLDVACARGCLDEETSRALSAPRADAKAYSDPSTGEPATYGELQQRCRPDQLTGLSLLPLSEKAARARQEELYSELQARETFEKTPVEVPVGGFKGRTVTVWELISSEYFTAEQRQELLRQFRTGKVTVEKVIKILITIVEEVETLRQERLSFSGLRAPVPASELLASGVLSRAQFEQLKDGKTTVKDLSELGSVRTLLQGSGCLAGIYLEDTKEKVSIYEAMRRGLLRATTAALLLEAQAATGFLVDPVRNQRLYVHEAVKAGVVGPELHEQLLSAEKAVTGYRDPYSGSTISLFQAMQKGLVLRQHGIRLLEAQIATGGIIDPVHSHRVPVDVAYQRGYFSEEMNRVLADPSDDTKGFFDPNTHENLTYRQLLERCVEDPETGLRLLPLKGAEKAEVVETTQVYTEEETRRAFEETQIDIPGGGSHGGSTMSLWEVMQSDLIPEEQRAQLMADFQAGRVTKERMIIIIIEIIEKTEIIRQQGLASYDYVRRRLTAEDLFEARIISLETYNLLREGTRSLREALEAESAWCYLYGTGSVAGVYLPGSRQTLSIYQALKKGLLSAEVARLLLEAQAATGFLLDPVKGERLTVDEAVRKGLVGPELHDRLLSAERAVTGYRDPYTEQTISLFQAMKKELIPTEEALRLLDAQLATGGIVDPRLGFHLPLEVAYQRGYLNKDTHDQLSEPSEVRSYVDPSTDERLSYTQLLRRCRRDDGTGQLLLPLSDARKLTFRGLRKQITMEELVRSQVMDEATALQLREGLTSIEEVTKNLQKFLEGTSCIAGVFVDATKERLSVYQAMKKGIIRPGTAFELLEAQAATGYVIDPIKGLKLTVEEAVRMGIVGPEFKDKLLSAERAVTGYKDPYSGKLISLFQAMKKGLILKDHGIRLLEAQIATGGIIDPEESHRLPVEVAYKRGLFDEEMNEILTDPSDDTKGFFDPNTEENLTYLQLMERCITDPQTGLCLLPLKEKKRERKTSSKSSVRKRRVVIVDPETGKEMSVYEAYRKGLIDHQTYLELSEQECEWEEITISSSDGVVKSMIIDRRSGRQYDIDDAIAKNLIDRSALDQYRAGTLSITEFADMLSGNAGGFRSRSSSVGSSSSYPISPAVSRTQLASWSDPTEETGPVAGILDTETLEKVSITEAMHRNLVDNITGQRLLEAQACTGGIIDPSTGERFPVTDAVNKGLVDKIMVDRINLAQKAFCGFEDPRTKTKMSAAQALKKGWLYYEAGQRFLEVQYLTGGLIEPDTPGRVPLDEALQRGTVDARTAQKLRDVGAYSKYLTCPKTKLKISYKDALDRSMVEEGTGLRLLEAAAQSTKGYYSPYSVSGSGSTAGSRTGSRTGSRAGSRRGSFDATGSGFSMTFSSSSYSSSGYGRRYASGSSASLGGPESAVA

SEQ ID NO: 736 - protein, 580 aa, Homo Sapiens
MFAGLQDLGVANGEDLKETLTNCTEPLKAIEQFQTENGVLLPSLQSALPFLDLHGTPRLEFHQSVFDELRDKLLERVSAIASEGKAEERYKKLEDLLEKSFSLVKMPSLQPVVMCVMKHLPKVPEKKLKLVMADKELYRACAVEVKRQIWQDNQALFGDEVSPLLKQYILEKESALFSTELSVLHNFFSPSPKTRRQGEVVQRLTRMVGKNVKLYDMVLQFLRTLFLRTRNVHYCTLRAELLMSLHDLDVGEICTVDPCHKFTWCLDACIRERFVDSKRARELQGFLDGVKKGQEQVLGDLSMILCDPFAINTLALSTVRHLQELVGQETLPRDSPDLLLLLRLLALGQGAWDMIDSQVFKEPKMEVELITRFLPMLMSFLVDDYTFNVDQKLPAEEKAPVSYPNTLPESFTKFLQEQRMACEVGLYYVLHITKQRNKNALLRLLPGLVETFGDLAFGDIFLHLLTGNLALLADEFALEDFCSSLFDGFFLTASPRKENVHRHALRLLIHLHPRVAPSKLEALQKALEPTGQSGEAVKELYSQLGEKLEQLDHRKPSPAQAAETPALELPLPSVPAPAPL

SEQ ID NO: 737 - protein, 406 aa, Homo Sapiens
MHPAVFLSLPDLRCSLLLLVTWVFTPVTTEITSLDTENIDEILNNADVALVNFYADWCRFSQMLHPIFEEASDVIKEEFPNENQVVFARVDCDQHSDIAQRYRISKYPTLKLFRNGMMMKREYRGQRSVKALADYIRQQKSDPIQEIRDLAEITTLDRSKRNIIGYFEQKDSDNYRVFERVANILHDDCAFLSAFGDVSKPERYSGDNIIYKPPGHSAPDMVYLGAMTNFDVTYNWIQDKCVPLVREITFENGEELTEEGLPFLILFHMKEDTESLEIFQNEVARQLISEKGTINFLHADCDKFRHPLLHIQKTPADCPVIAIDSFRHMYVFGDFKDVLIPGKLKQFVFDLHSGKLHREFHHGPDPTDTAPGEQAQDVASSPPESSFQKLAPSEYRYTLLRDRDEL

SEQ ID NO: 738 - protein, 703 aa, Homo Sapiens
MERAAPSRRVPLPLLLLGGLALLAAGVDADVLLEACCADGHRMATHQKDCSLPYATESKECRMVQEQCCHSQLEELHCATGISLANEQDRCATPHGDNASLEATFVKRCCHCCLLGRAAQAQGQSCEYSLMVGYQCGQVFQACCVKSQETGDLDVGGLQETDKIIEVEEEQEDPYLNDRCRGGGPCKQQCRDTGDEVVCSCFVGYQLLSDGVSCEDVNECITGSHSCRLGESCINTVGSFRCQRDSSCGTGYELTEDNSCKDIDECESGIHNCLPDFICQNTLGSFRCRPKLQCKSGFIQDALGNCIDINECLSISAPCPIGHTCINTEGSYTCQKNVPNCGRGYHLNEEGTRCVDVDECAPPAEPCGKGHRCVNSPGSFRCECKTGYYFDGISRMCVDVNECQRYPGRLCGHKCENTLGSYLCSCSVGFRLSVDGRSCEDINECSSSPCSQECANVYGSYQCYCRRGYQLSDVDGVTCEDIDECALPTGGHICSYRCINIPGSFQCSCPSSGYRLAPNGRNCQDIDECVTGIHNCSINETCFNIQGGFRCLAFECPENYRRSAATQKSKKGRQNTPAGSSKEDCRVLPWKQGLEDTHLDASLPTFREFTRPEEIIFLRAITPPHPASQANIIFDITEGNLRDSFDIIKRYMDGMTVGVVRQVRPIVGPFHAVLKLEMNYVVGGVVSHRNVVNVHIFVSEYWF

SEQ ID NO: 739 - protein, 485 aa, Homo Sapiens
MELEVRRVRQAFLSGRSRPLRFRLQQLEALRRMVQEREKDILTAIAADLCKSEFNVYSQEVITVLGEIDFMLENLPEWVTAKPVKKNVLTMLDEAYIQPQPLGVVLIIGAWNYPFVLTIQPLIGAIAAGNAVIIKPSELSENTAKILAKLLPQYLDQDLYIVINGGVEETTELLKQRFDHIFYTGNTAVGKIVMEAAAKHLTPVTLELGGKSPCYIDKDCDLDIVCRRITWGKYMNCGQTCIAPDYILCEASLQNQIVWKIKETVKEFYGENIKESPDYERIINLRHFKRILSLLEGQKIAFGGETDEATRYIAPTVLTDVDPKTKVMQEEIFGPILPIVPVKNVDEAINFINEREKPLALYVFSHNHKLIKRMIDETSSGGVTGNDVIMHFTLNSFPFGGVGSSGMGAYHGKHSFDTFSHQRPCLLKSLKREGANKLRYPPNSQSKVDWGKFFLLKRFNKEKLGLLLLTFLGIVAAVLVKAEYY

SEQ ID NO: 740 - protein, 417 aa, Homo Sapiens
MAAPGSARRPLLLLLLLLLLGLMHCASAAMFMVKNGNGTACIMANFSAAFSVNYDTKSGPKNMTFDLPSDATVVLNRSSCGKENTSDPSLVIAFGRGHTLTLNFTRNATRYSVQLMSFVYNLSDTHLFPNASSKEIKTVESITDIRADIDKKYRCVSGTQVHMNNVTVTLHDATIQAYLSNSSFSRGETRCEQDRPSPTTAPPAPPSPSPSPVPKSPSVDKYNVSGTNGTCLLASMGLQLNLTYERKDNTTVTRLLNINPNKTSASGSCGAHLVTLELHSEGTTVLLFQFGMNASSSRFFLQGIQLNTILPDARDPAFKAANGSLRALQATVGNSYKCNAEEHVRVTKAFSVNIFKVWVQAFKVEGGQFGSVEECLLDENSMLIPIAVGGALAGLVLIVLIAYLVGRKRSHAGYQTI

SEQ ID NO: 741 - protein, 2511 aa, Homo Sapiens
MEEVVIAGMSGKLPESENLQEFWDNLIGGVDMVTDDDRRWKAGLYGLPRRSGKLKDLSRFDASFFGVHPKQAHTMDPQLRLLLEVTYEAIVDGGINPDSLRGTHTGVWVGVSGSETSEALSRDPETLVGYSMVGCQRAMMANRLSFFFDFRGPSIALDTACSSSLMALQNAYQAIHSGQCPAAIVGGINVLLKPNTSVQFLRLGMLSPEGTCKAFDTAGNGYCRSEGVVAVLLTKKSLARRVYATILNAGTNTDGFKEQGVTFPSGDIQEQLIRSLYQSAGVAPESFEYIEAHGTGTKVGDPQELNGITRALCATRQEPLLIGSTKSNMGHPEPASGLAALAKVLLSLEHGLWAPNLHFHSPNPEIPALLDGRLQVVDQPLPVRGGNVGINSFGFGGSNVHIILRPNTQPPPAPAPHATLPRLLRASGRTPEAVQKLLEQGLRHSQDLAFLSMLNDIAAVPATAMPFRGYAVLGGERGGPEVQQVPAGERPLWFICSGMGTQWRGMGLSLMRLDRFRDSILRSDEAVKPFGLKVSQLLLSTDESTFDDIVHSFVSLTAIQIGLIDLLSCMGLRPDGIVGHSLGEVACGYADGCLSQEEAVLAAYWRGQCIKEAHLPPGAMAAVGLSWEECKQRCPPGVVPACHNSKDTVTISGPQAPVFEFVEQLRKEGVFAKEVRTGGMAFHSYFMEAIAPPLLQELKKVIREPKPRSARWLSTSIPEAQWHSSLARTSSAEYNVNNLVSPVLFQEALWHVPEHAVVLEIAPHALLQAVLKRGLKPSCTIIPLMKKDHRDNLEFFLAGIGRLHLSGIDANPNALFPPVEFPAPRGTPLISPLIKWDHSLAWDVPAAEDFPNGSGSPSAAIYNIDTSSESPDHYLVDHTLDGRVLFPATGYLSIVWKTLARALGLGVEQLPVVFEDVVLHQATILPKTGTVSLEVRLLEASRAFEVSENGNLVVSGKVYQWDDPDPRLFDHPESPTPNPTEPLFLAQAEVYKELRLRGYDYGPHFQGILEASLEGDSGRLLWKDNWVSFMDTMLQMSILGSAKHGLYLPTRVTAIHIDPATHRQKLYTLQDKAQVADVVVSRWLRVTVAGGVHISGLHTESAPRRQQEQQVPILEKFCFTPHTEEGCLSERAALQEELQLCKGLVQALQTKVTQQGLKMVVPGLDGAQIPRDPSQQELPRLLSAACRLQLNGNLQLELAQVLAQERPKLPEDPLLSGLLDSPALKACLDTAVENMPSLKMKVVEVLAGHGHLYSRIPGLLSPHPLLQLSYTATDRHPQALEAAQAELQQHDVAQGQWDPADPAPSALGSADLLVCNCAVAALGDPASALSNMVAALREGGFLLLHTLLRGHPLGDIVAFLTSTEPQYGQGILSQDAWESLFSRVSLRLVGLKKSFYGSTLFLCRRPTPQDSPIFLPVDDTSFRWVESLKGILADEDSSRPVWLKAINCATSGVVGLVNCLRREPGGNRLRCVLLSNLSSTSHVPEVDPGSAELQKVLQGDLVMNVYRDGAWGAFRHFLLEEDKPEEPTAHAFVSTLTRGDLSSIRWVCSSLRHAQPTCPGAQLCTVYYASLNFRDIMLATGKLSPDAIPGKWTSQDSLLGMEFSGRDASGKRVMGLVPAKGLATSVLLSPDFLWDVPSNWTLEEAASVPVVYSTAYYALVVRGRVRPGETLLIHSGSGGVGQAAIAIALSLGCRVFTTVGSAEKRAYLQARFPQLDSTSFANSRDTSFEQHVLWHTGGKGVDLVLNSLAEEKLQASVRCLATHGRFLEIGKFDLSQNHPLGMAIFLKNVTFHGVLLDAFFNESSADWREVWALVQAGIRDGVVRPLKCTVFHGAQVEDAFRYMAQGKHIGKVVVQVLAEEPEAVLKGAKPKLMSAISKTFCPAHKSYIIAGGLGGFGLELAQWLIQRGVQKLVLTSRSGIRTGYQAKQVRRWRRQGVQVQVSTSNISSLEGARGLIAEAAQLGPVGGVFNLAVVLRDGLLENQTPEFFQDVCKPKYSGTLNLDRVTREACPELDYFVVFSSVSCGRGNAGQSNYGFANSAMERICEKRRHEGLPGLAVQWGAIGDVGILVETMSTNDTIVSGTLPQRMASCLEVLDLFLNQPHMVLSSFVLAEKAAAYRDRDSQRDLVEAVAHILGIRDLAAVNLDSSLADLGLDSLMSVEVRQTLERELNLVLSVREVRQLTLRKLQELSSKADEASELACPTPKEDGLAQQQTQLNLRSLLVNPEGPTLMRLNSVQSSERPLFLVHPIEGSTTVFHSLASRLSIPTYGLQCTRAAPLDSIHSLAAYYIDCIRQVQPEGPYRVAGYSYGACVAFEMCSQLQAQQSPAPTHNSLFLFDGSPTYVLAYTQSYRAKLTPGCEAEAETEAICFFVQQFTDMEHNRVLEALLPLKGLEERVAAAVDLIIKSHQGLDRQELSFAARSFYYKLRAAEQYTPKAKYHGNVMLLRAKTGGAYGEDLGADYNLSQVCDGKVSVHVIEGDHRTLLEGSGLESIISIIHSSLAEPRVSVREG

SEQ ID NO: 742 - protein, 397 aa, Homo Sapiens
MNAGSDPVVIVSAARTIIGSFNGALAAVPVQDLGSTVIKEVLKRATVAPEDVSEVIFGHVLAAGCGQNPVRQASVGAGIPYSVPAWSCQMICGSGLKAVCLAVQSIGIGDSSIVVAGGMENMSKAPHLAYLRTGVKIGEMPLTDSILCDGLTDAFHNCHMGITAENVAKKWQVSREDQDKVAVLSQNRTENAQKAGHFDKEIVPVLVSTRKGLIEVKTDEFPRHGSNIEAMSKLKPYFLTDGTGTVTPANASGINDGAAAVVLMKKSEADKRGLTPLARIVSWSQVGVEPSIMGIGPIPAIKQAVTKAGWSLEDVDIFEINEAFAAVSAAIVKELGLNPEKVNIEGGAIALGHPLGASGCRILVTLLHTLERMGRSRGVAALCIGGGMGIAMCVQRE

SEQ ID NO: 743 - protein, 240 aa, Homo Sapiens
MSRLLPLLRSRTARSLRPGPAAAAAPRPPSWCCCGRGLLALAPPGGLPGGPRRLGTHPKKEPMEALNTAQGARDFIYSLHSTERSCLLKELHRFESIAIAQEKLEAPPPTPGQLRYVFIHNAIPFIGFGFLDNAIMIVAGTHIEMSIGIILGISTMAAAALGNLVSDLAGLGLAGYVEALASRLGLSIPDLTPKQVDMWQTRLSTHLGKAVGVTIGCILGMFPLIFFGGGEEDEKLETKS

SEQ ID NO: 744 - protein, 267 aa, Homo Sapiens
MAEQDVENDLLDYDEEEEPQAPQESTPAPPKKDIKGSYVSIHSSGFRDFLLKPELLRAIVDCGFEHPSEVQHECIPQAILGMDVLCQAKSGMGKTAVFVLATLQQIEPVNGQVTVLVMCHTRELAFQISKEYERFSKYMPSVKVSVFFGGLSIKKDEEVLKKNCPHVVVGTPGRILALVRNRSFSLKNVKHFVLDECDKMLEQLDMRRDVQEIFRLTPHEKQCMMFSATLSKDIRPVCRKFMQDVLWEVSHKGVAHWKVLGRRDAQR

SEQ ID NO: 745 - protein, 5890 aa, Homo Sapiens
MEKEETTRELLLPNWQGSGSHGLTIAQRDDGVFVQEVTQNSPAARTGVVKEGDQIVGATIYFDNLQSGEVTQLLNTMGHHTVGLKLHRKGDRSPEPGQTWTREVFSSCSSEVVLSGDDEEYQRIYTTKIKPRLKSEDGVEGDLGETQSRTITVTRRVTAYTVDVTGREGAKDIDISSPEFKIKIPRHELTEISNVDVETQSGKTVIRLPSGSGAASPTGSAVDIRAGAISASGPELQGAGHSKLQVTMPGIKVGGSGVNVNAKGLDLGGRGGVQVPAVDISSSLGGRAVEVQGPSLESGDHGKIKFPTMKVPKFGVSTGREGQTPKAGLRVSAPEVSVGHKGGKPGLTIQAPQLEVSVPSANIEGLEGKLKGPQITGPSLEGDLGLKGAKPQGHIGVDASAPQIGGSITGPSVEVQAPDIDVQGPGSKLNVPKMKVPKFSVSGAKGEETGIDVTLPTGEVTVPGVSGDVSLPEIATGGLEGKMKGTKVKTPEMIIQKPKISMQDVDLSLGSPKLKGDIKVSAPGVQGDVKGPQVALKGSRVDIETPNLEGTLTGPRLGSPSGKTGTCRISMSEVDLNVAAPKVKGGVDVTLPRVEGKVKVPEVDVRGPKVDVSAPDVEAHGPEWNLKMPKMKMPTFSTPGAKGEGPDVHMTLPKGDISISGPKVNVEAPDVNLEGLGGKLKGPDVKLPDMSVKTPKISMPDVDLHVKGTKVKGEYDVTVPKLEGELKGPKVDIDAPDVDVHGPDWHLKMPKMKMPKFSVPGFKAEGPEVDVNLPKADVDISGPKIDVTAPDVSIEEPEGKLKGPKFKMPEMNIKVPKISMPDVDLHLKGPNVKGEYDVTMPKVESEIKVPDVELKSAKMDIDVPDVEVQGPDWHLKMPKMKMPKFSMPGFKAEGPEVDVNLPKADVDISGPKVGVEVPDVNIEGPEGKLKGPKFKMPEMNIKAPKISMPDVDLHMKGPKVKGEYDMTVPKLEGDLKGPKVDVSAPDVEMQGPDWNLKMPKIKMPKFSMPSLKGEGPEFDVNLSKANVDISAPKVDTNAPDLSLEGPEGKLKGPKFKMPEMHFRAPKMSLPDVDLDLKGPKMKGNVDISAPKIEGEMQVPDVDIRGPKVDIKAPDVEGQGLDWSLKIPKMKMPKFSMPSLKGEGPEVDVNLPKADVVVSGPKVDIEAPDVSLEGPEGKLKGPKFKMPEMHFKTPKISMPDVDLHLKGPKVKGDVDVSVPKVEGEMKVPDVEIKGPKMDIDAPDVEVQGPDWHLKMPKMKMPKFSMPGFKGEGREVDVNLPKADIDVSGPKVDVEVPDVSLEGPEGKLKGPKFKMPEMHFKAPKISMPDVDLNLKGPKLKGDVDVSLPEVEGEMKVPDVDIKGPKVDISAPDVDVHGPDWHLKMPKVKMPKFSMPGFKGEGPEVDVKLPKADVDVSGPKMDAEVPDVNIEGPDAKLKGPKFKMPEMSIKPQKISIPDVGLHLKGPKMKGDYDVTVPKVEGEIKAPDVDIKGPKVDINAPDVEVHGPDWHLKMPKVKMPKFSMPGFKGEGPEVDMNLPKADLGVSGPKVDIDVPDVNLEAPEGKLKGPKFKMPSMNIQTHKISMPDVGLNLKAPKLKTDVDVSLPKVEGDLKGPEIDVKAPKMDVNVGDIDIEGPEGKLKGPKFKMPEMHFKAPKISMPDVDLHLKGPKVKGDMDVSVPKVEGEMKVPDVDIKGPKVDIDAPDVEVHDPDWHLKMPKMKMPKFSMPGFKAEGPEVDVNLPKADIDVSGPSVDTDAPDLDIEGPEGKLKGSKFKMPKLNIKAPKVSMPDVDLNLKGPKLKGEIDASVPELEGDLRGPQVDVKGPFVEAEVPDVDLECPDAKLKGPKFKMPEMHFKAPKISMPDVDLHLKGPKVKGDADVSVPKLEGDLTGPSVGVEVPDVELECPDAKLKGPKFKMPDMHFKAPKISMPDVDLHLKGPKVKGDVDVSVPKLEGDLTGPSVGVEVPDVELECPDAKLKGPKFKMPEMHFKTPKISMPDVDLHLKGPKVKGDMDVSVPKVEGEMKVPDVDIKGPKMDIDAPDVDVHGPDWHLKMPKMKMPKFSMPGFKAEGPEVDVNLPKADVVVSGPKVDVEVPDVSLEGPEGKLKGPKLKMPEMHFKAPKISMPDVDLHLKGPKVKGDVDVSLPKLEGDLTGPSVDVEVPDVELECPDAKLKGPKFKMPEMHFKTPKISMPDVNLNLKGPKVKGDMDVSVPKVEGEMKVPDVDIRGPKVDIDAPDVDVHGPDWHLKMPKMKMPKFSMPGFKGEGPEVDVNLPKADVDVSGPKVDVEVPDVSLEGPEGKLKGPKFKMPEMHFKTPKISMPDVDFNLKGPKIKGDVDVSAPKLEGELKGPELDVKGPKLDADMPEVAVEGPNGKWKTPKFKMPDMHFKAPKISMPDLDLHLKSPKAKGEVDVDVPKLEGDLKGPHVDVSGPDIDIEGPEGKLKGPKFKMPDMHFKAPNISMPDVDLNLKGPKIKGDVDVSVPEVEGKLEVPDMNIRGPKVDVNAPDVQAPDWHLKMPKMKMPKFSMPGFKAEGPEVDVNLPKADVDISGPKVDIEGPDVNIEGPEGKLKGPKLKMPEMNIKAPKISMPDFDLHLKGPKVKGDVDVSLPKVEGDLKGPEVDIKGPKVDINAPDVGVQGPDWHLKMPKVKMPKFSMPGFKGEGPDGDVKLPKADIDVSGPKVDIEGPDVNIEGPEGKLKGPKFKMPEMNIKAPKISMPDIDLNLKGPKVKGDVDVSLPKVEGDLKGPEVDIKGPKVDIDAPDVDVHGPDWHLKMPKIKMPKISMPGFKGEGPDVDVNLPKADIDVSGPKVDVECPDVNIEGPEGKWKSPKFKMPEMHFKTPKISMPDIDLNLTGPKIKGDVDVTGPKVEGDLKGPEVDLKGPKVDIDVPDVNVQGPDWHLKMPKMKMPKFSMPGFKAEGPEVDVNLPKADVDVSGPKVDVEGPDVNIEGPEGKLKGPKFKMPEMNIKAPKIPMPDFDLHLKGPKVKGDVDISLPKVEGDLKGPEVDIRGPQVDIDVPDVGVQGPDWHLKMPKVKMPKFSMPGFKGEGPDVDVNLPKADLDVSGPKVDIDVPDVNIEGPEGKLKGPKFKMPEMNIKAPKISMPDIDLNLKGPKVKGDMDVSLPKVEGDMKVPDVDIKGPKVDINAPDVDVQGPDWHLKMPKIKMPKISMPGFKGEGPEVDVNLPKADLDVSGPKVDVDVPDVNIEGPDAKLKGPKFKMPEMNIKAPKISMPDLDLNLKGPKMKGEVDVSLANVEGDLKGPALDIKGPKIDVDAPDIDIHGPDAKLKGPKLKMPDMHVNMPKISMPEIDLNLKGSKLKGDVDVSGPKLEGDIKAPSLDIKGPEVDVSGPKLNIEGKSKKSRFKLPKFNFSGSKVQTPEVDVKGKKPDIDITGPKVDINAPDVEVQGKVKGSKFKMPFLSISSPKVSMPDVELNLKSPKVKGDLDIAGPNLEGDFKGPKVDIKAPEVNLNAPDVDVHGPDWNLKMPKMKMPKFSVSGLKAEGPDVAVDLPKGDINIEGPSMNIEGPDLNVEGPEGGLKGPKFKMPDMNIKAPKISMPDIDLNLKGPKVKGDVDISLPKLEGDLKGPEVDIKGPKVDINAPDVDVHGPDWHLKMPKVKMPKFSMPGFKGEGPEVDVTLPKADIDISGPNVDVDVPDVNIEGPDAKLKGPKFKMPEMNIKAPKISMPDFDLNLKGPKMKGDVVVSLPKVEGDLKGPEVDIKGPKVDIDTPDINIEGSEGKFKGPKFKIPEMHLKAPKISMPDIDLNLKGPKVKGDVDVSLPKMEGDLKGPEVDIKGPKVDINAPDVDVQGPDWHLKMPKVKMPKFSMPGFKGEGPDVDVNLPKADLDVSGPKVDIDVPDVNIEGPEGKLKGPKFKMPEMNIKAPKISMPDIDLNLKGPKVKGDMDVSLPKVEGDMQVPDLDIKGPKVDINAPDVDVRGPDWHLKMPKIKMPKISMPGFKGEGPEVDVNLPKADLDVSGPKVDVDVPDVNIEGPDAKLKGPKFKMPEMNIKAPKISMPDFDLHLKGPKVKGDVDVSLPKMEGDLKAPEVDIKGPKVDIDAPDVDVHGPDWHLKMPKVKMPKFSMPGFKGEGPEVDVNLPKADIDVSGPKVDIDTPDIDIHGPEGKLKGPKFKMPDLHLKAPKISMPEVDLNLKGPKMKGDVDVSLPKVEGDLKGPEVDIKGPKVDIDVPDVDVQGPDWHLKMPKVKMPKFSMPGFKGEGPDVDVNLPKADLDVSGPKVDIDVPDVNIEGPDAKLKGPKFKMPEMNIKAPKISMPDFDLHLKGPKVKGDVDVSLPKVEGDLKGPEVDIKGPKVDIDAPDVDVHGPDWHLKMPKVKMPKFSMPGFKGEGPDVDVTLPKADIEISGPKVDIDAPDVSIEGPDAKLKGPKFKMPEMNIKAPKISMPDIDFNLKGPKVKGDVDVSLPKVEGDLKGPEIDIKGPSLDIDTPDVNIEGPEGKLKGPKFKMPEMNIKAPKISMPDFDLHLKGPKVKGDVDVSLPKVESDLKGPEVDIEGPEGKLKGPKFKMPDVHFKSPQISMSDIDLNLKGPKIKGDMDISVPKLEGDLKGPKVDVKGPKVGIDTPDIDIHGPEGKLKGPKFKMPDLHLKAPKISMPEVDLNLKGPKVKGDMDISLPKVEGDLKGPEVDIRDPKVDIDVPDVDVQGPDWHLKMPKVKMPKFSMPGFKGEGPDVDVNLPKADIDVSGPKVDVDVPDVNIEGPDAKLKGPKFKMPEMSIKAPKISMPDIDLNLKGPKVKGDVDVTLPKVEGDLKGPEADIKGPKVDINTPDVDVHGPDWHLKMPKVKMPKFSMPGFKGEGPDVDVSLPKADIDVSGPKVDVDIPDVNIEGPDAKLKGPKFKMPEINIKAPKISIPDVDLDLKGPKVKGDFDVSVPKVEGTLKGPEVDLKGPRLDFEGPDAKLSGPSLKMPSLEISAPKVTAPDVDLHLKAPKIGFSGPKLEGGEVDLKGPKVEAPSLDVHMDSPDINIEGPDVKIPKFKKPKFGFGAKSPKADIKSPSLDVTVPEAELNLETPEISVGGKGKKSKFKMPKIHMSGPKIKAKKQGFDLNVPGGEIDASLKAPDVDVNIAGPDAALKVDVKSPKTKKTMFGKMYFPDVEFDIKSPKFKAEAPLPSPKLEGELQAPDLELSLPAIHVEGLDIKAKAPKVKMPDVDISVPKIEGDLKGPKVQANLGAPDINIEGLDAKVKTPSFGISAPQVSIPDVNVNLKGPKIKGDVPSVGLEGPDVDLQGPEAKIKFPKFSMPKIGIPGVKMEGGGAEVHAQLPSLEGDLRGPDVKLEGPDVSLKGPGVDLPSVNLSMPKVSGPDLDLNLKGPSLKGDLDASVPSMKVHAPGLNLSGVGGKMQVGGDGVKVPGIDATTKLNVGAPDVTLRGPSLQGDLAVSGDIKCPKVSVGAPDLSLEASEGSIKLPKMKLPQFGISTPGSDLHVNAKGPQVSGELKGPGVDVNLKGPRISAPNVDFNLEGPKVKGSLGATGEIKGPTVGGGLPGIGVQGLEGNLQMPGIKSSGCDVNLPGVNVKLPTGQISGPEIKGGLKGSEVGFHGAAPDISVKGPAFNMASPESDFGINLKGPKIKGGADVSGGVSAPDISLGEGHLSVKGSGGEWKGPQVSSALNLDTSKFAGGLHFSGPKVEGGVKGGQIGLQAPGLSVSGPQGHLESGSGKVTFPKMKIPKFTFSGRELVGREMGVDVHFPKAEASIQAGAGDGEWEESEVKLKKSKIKMPKFNFSKPKGKGGVTGSPEASISGSKGDLKSSKASLGSLEGEAEAEASSPKGKFSLFKSKKPRHRSNSFSDEREFSGPSTPTGTLEFEGGEVSLEGGKVKGKHGKLKFGTFGGLGSKSKGHYEVTGSDDETGKLQGSGVSLASKKSRLSSSSSNDSGNKVGIQLPEVELSVSTKKE

SEQ ID NO: 746 - protein, 428 aa, Homo Sapiens
MAASIVRRGMLLARQVVLPQLSPAGKRYLLSSAYVDSHKWEAREKEHYCLADLASLMDKTFERKLPVSSLTISRLIDNISSREEIDHAEYYLYKKGECSSSNPQNYSRFRHSPNCWYLRNWTIHTWIRQCLKYDAQDKALYTLVNKVQYGIFPDNFTFNLLMDSFIKKENYKDALSVVFEVMMQEAFEVPSTQLLSLYVLFHCLAKKTDFSWEEERNFGASLLLPGLKQKNSVGFSSQLYGYALLGKVELQQGLRAVYHNMPLIWKPGYLDRALQVMEKVAASPEDIKLCREALDVLGAVLKALTSADGASEEQSQNDEDNQGSEKLVEQLDIEETEQSKLPQYLERFKALHSKLQALGKIESEGLLSLTTQLVKEKLSTCEAEDIATYEQNLQQWHLDLVQLIQREQQQREQAKQEYQAQKAAKASA

SEQ ID NO: 747 - protein, 538 aa, Homo Sapiens
MAAEQDPEARAAARPLLTDLYQATMALGYWRAGRARDAAEFELFFRRCPFGGAFALAAGLRDCVRFLRAFRLRDADVQFLASVLPPDTDPAFFEHLRALDCSEVTVRALPEGSLAFPGVPLLQVSGPLLVVQLLETPLLCLVSYASLVATNAARLRLIAGPEKRLLEMGLRRAQGPDGGLTASTYSYLGGFDSSSNVLAGQLRGVPVAGTLAHSFVTSFSGSEVPPDPMLAPAAGEGPGVDLAAKAQVWLEQVCAHLGLGVQEPHPGERAAFVAYALAFPRAFQGLLDTYSVWRSGLPNFLAVALALGELGYRAVGVRLDSGDLLQQAQEIRKVFRAAAAQFQVPWLESVLIVVSNNIDEEALARLAQEGSEVNVIGIGTSVVTCPQQPSLGGVYKLVAVGGQPRMKLTEDPEKQTLPGSKAAFRLLGSDGSPLMDMLQLAEEPVPQAGQELRVWPPGAQEPCTVRPAQVEPLLRLCLQQGQLCEPLPSLAESRALAQLSLSRLSPEHRRLRSPAQYQVVLSERLQALVNSLCAGQSP

SEQ ID NO: 748 - protein, 370 aa, Homo Sapiens
MAGAENWPGQQLELDEDEASCCRWGAQHAGARELAALYSPGKRLQEWCSVILCFSLIAHNLVHLLLLARWEDTPLVILGVVAGALIADFLSGLVHWGADTWGSVELPIVGKAFIRPFREHHIDPTAITRHDFIETNGDNCLVTLLPLLNMAYKFRTHSPEALEQLYPWECFVFCLIIFGTFTNQIHKWSHTYFGLPRWVTLLQDWHVILPRKHHRIHHVSPHETYFCITTGVKVPRNFRLLEELEEGQKGVGDGTVSWGLEDDEDMTLTRWTGMIIGPPRTIYENRIYSLKIECGPKYPEAPPFVRFVTKINMNGVNSSNGVVDPRAISVLAKWQNSYSIKVVLQELRRLMMSKENMKLPQPPEGQCYSN

SEQ ID NO: 749 - protein, 165 aa, Homo Sapiens
MGWDLTVKMLAGNEFQVSLSSSMSVSELKAQITQKIGVHAFQQRLAVHPSGVALQDRVPLASQGLGPGSTVLLVVDKCDEPLSILVRNNKGRSSTYEVRLTQTVAHLKQQVSGLEGVQDDLFWLTFEGKPLEDQLPLGEYGLKPLSTVFMNLRLRGGGTEPGGRS

SEQ ID NO: 750 - protein, 629 aa, Homo Sapiens
MENSTTTISREELEELQEAFNKIDIDNSGYVSDYELQDLFKEASLPLPGYKVREIVEKILSVADSNKDGKISFEEFVSLMQELKSKDISKTFRKIINKREGITAIGGTSTISSEGTQHSYSEEEKVAFVNWINKALENDPDCKHLIPMNPNDDSLFKSLADGILLCKMINLSEPDTIDERAINKKKLTPFTISENLNLALNSASAIGCTVVNIGASDLKEGKPHLVLGLLWQIIKVGLFADIEISRNEALIALLNEGEELEELMKLSPEELLLRWVNYHLTNAGWHTISNFSQDIKDSRAYFHLLNQIAPKGGEDGPAIAIDLSGINETNDLKRAGLMLQEADKLGCKQFVTPADVVSGNPKLNLAFVANLFNTYPCLHKPNNNDIDMNLLEGESKEERTFRNWMNSLGVNPYINHLYSDLADALVIFQLYEMIRVPVNWSHVNKPPYPALGGNMKKIENCNYAVELGKNKAKFSLVGIAGQDLNEGNSTLTLALVWQLMRRYTLNVLSDLGEGEKVNDEIIIKWVNQTLKSANKKTSISSFKDKSISTSLPVLDLIDAIAPNAVRQEMIRRENLSDEDKLNNAKYAISVARKIGARIYALPDDLVEVKPKMVMTVFACLMGKGLNRIK

SEQ ID NO: 751 - protein, 215 aa, Homo Sapiens
MPGEATETVPATEQELPQPQAETGSGTESDSDESVPELEEQDSTQATTQQAQLAAAAEIDEEPVSKAKQSRSEKKARKAMSKLGLRQVTGVTRVTIRKSKNILFVITKPDVYKSPASDTYIVFGEAKIEDLSQQAQLAAAEKFKVQGEAVSNIQENTQTPTVQEESEEEEVDETGVEVKDIELVMSQANVSRAKAVRALKNNSNDIVNAIMELTM

SEQ ID NO: 752 - protein, 194 aa, Homo Sapiens
MEEKLKKTKIIFVVGGPGSGKGTQCEKIVQKYGYTHLSTGDLLRSEVSSGSARGKKLSEIMEKGQLVPLETVLDMLRDAMVAKVNTSKGFLIDGYPREVQQGEEFERRIGQPTLLLYVDAGPETMTQRLLKRGETSGRVDDNEETIKKRLETYYKATEPVIAFYEKRGIVRKVNAEGSVDSVFSQVCTHLDALK

SEQ ID NO: 753 - protein, 277 aa, Homo Sapiens
MADPWQECMDYAVTLARQAGEVVCEAIKNEMNVMLKSSPVDLVTATDQKVEKMLISSIKEKYPSHSFIGEESVAAGEKSILTDNPTWIIDPIDGTTNFVHRFPFVAVSIGFAVNKKIEFGVVYSCVEGKMYTARKGKGAFCNGQKLQVSQQEDITKSLLVTELGSSRTPETVRMVLSNMEKLFCIPVHGIRSVGTAAVNMCLVATGGADAYYEMGIHCWDVAGAGIIVTEAGGVLMDVTGGPFDLMSRRVIAANNRILAERIAKEIQVIPLQRDDED

SEQ ID NO: 754 - protein, 425 aa, Homo Sapiens
MGEDAAQAEKFQHPGSDMRQEKPSSPSPMPSSTPSPSLNLGNTEEAIRDNSQVNAVTVLTLLDKLVNMLDAVQENQHKMEQRQISLEGSVKGIQNDLTKLSKYQASTSNTVSKLLEKSRKVSAHTRAVKERMDRQCAQVKRLENNHAQLLRRNHFKVLIFQEENEIPASVFVKQPVSGAVEGKEELPDENKSLEETLHTVDLSSDDDLPHDEEALEDSAEEKVEESRAEKIKRSSLKKVDSLKKAFSRQNIEKKMNKLGTKIVSVERREKIKKSLTSNHQKISSGKSSPFKVSPLTFGRKKVREGESHAENETKSEDLPSSEQMPNDQEEESFAEGHSEASLASALVEGEIAEEAAEKATSRGSNSGMDSNIDLTIVEDEEEESVALEQAQKVRYEGSYALTSEEAERSDGDPVQPAVLQVHQTS

SEQ ID NO: 755 - protein, 649 aa, Homo Sapiens
MNSSDEEKQLQLITSLKEQAIGEYEDLRAENQKTKEKCDKIRQERDEAVKKLEEFQKISHMVIEEVNFMQNHLEIEKTCRESAEALATKLNKENKTLKRISMLYMAKLGPDVITEEINIDDEDSTTDTDGAAETCVSVQCQKQIKELRDQIVSVQEEKKILAIELENLKSKLVEVIEEVNKVKQEKTVLNSEVLEQRKVLEKCNRVSMLAVEEYEEMQVNLELEKDLRKKAESFAQEMFIEQNKLKRQSHLLLQSSIPDQQLLKALDENAKLTQQLEEERIQHQQKVKELEEQLENETLHKEIHNLKQQLELLEEDKKELELKYQNSEEKARNLKHSVDELQKRVNQSENSVPPPPPPPPPLPPPPPNPIRSLMSMIRKRSHPSGSGAKKEKATQPETTEEVTDLKRQAVEEMMDRIKKGVHLRPVNQTARPKTKPESSKGCESAVDELKGILGTLNKSTSSRSLKSLDPENSETELERILRRRKVTAEADSSSPTGILATSESKSMPVLGSVSSVTKTALNKKTLEAEFNSPSPPTPEPGEGPRKLEGCTSSKVTFQPPSSIGCRKKYIDGEKQAEPVVVLDPVSTHEPQTKDQVAEKDPTQHKEDEGEIQPENKEDSIENFFPFHFGFEGVLPLAGVTLSTKARDPK

SEQ ID NO: 756 - protein, 208 aa, Homo Sapiens
MASKCPKCDKTVYFAEKVSSLGKDWHKFCLKCERCSKTLTPGGHAEHDGKPFCHKPCYATLFGPKGVNIGGAGSYIYEKPLAEGPQVTGPIEVPAARAEERKASGPPKGPSRASSVTTFTGEPNTCPRCSKKVYFAEKVTSLGKDWHRPCLRCERCGKTLTPGGHAEHDGQPYCHKPCYGILFGPKGVNTGAVGSYIYDRDPEGKVQP

SEQ ID NO: 757 - protein, 198 aa, Homo Sapiens
MFKVIQRSVGPASLSLLTFKVYAAPKKDSPPKNSVKVDELSLYSVPEGQSKYVEEARSQLEESISQLRHYCEPYTTWCQETYSQTKPKMQSLVQWGLDSYDYLQNAPPGFFPRLGVIGFAGLIGLLLARGSKIKKLVYPPGFMGLAASLYYPQQAIVFAQVSGERLYDWGLRGYIVIEDLWKENFQKPGNVKNSPGTK

SEQ ID NO: 758 - protein, 539 aa, Homo Sapiens
MWRLPRALCVHAAKTSKLSGPWSRPAAFMSTLLINQPQYAWLKELGLREENEGVYNGSWGGRGEVITTYCPANNEPIARVRQASVADYEETVKKAREAWKIWADIPAPKRGEIVRQIGDALREKIQVLGSLVSLEMGKILVEGVGEVQEYVDICDYAVGLSRMIGGPILPSERSGHALIEQWNPVGLVGIITAFNFPVAVYGWNNAIAMICGNVCLWKGAPTTSLISVAVTKIIAKVLEDNKLPGAICSLTCGGADIGTAMAKDERVNLLSFTGSTQVGKQVGLMVQERFGRSLLELGGNNAIIAFEDADLSLVVPSALFAAVGTAGQRCTTARRLFIHESIHDEVVNRLKKAYAQIRVGNPWDPNVLYGPLHTKQAVSMFLGAVEEAKKEGGTVVYGGKVMDRPGNYVEPTIVTGLGHDASIAHTETFAPILYVFKFKNEEEVFAWNNEVKQGLSSSIFTKDLGRIFRWLGPKGSDCGIVNVNIPTSGAEIGGAFGGEKHTGGGRESGSDAWKQYMRRSTCTINYSKDLPLAQGIKFQ

SEQ ID NO: 759 - protein, 586 aa, Homo Sapiens
MKKSYSGGTRTSSGRLRRLGDSSGPALKRSFEVEEVETPNSTPPRRVQTPLLRATVASSTQKFQDLGVKNSEPSARHVDSLSQRSPKASLRRVELSGPKAAEPVSRRTELSIDISSKQVENAGAIGPSRFGLKRAEVLGHKTPEPAPRRTEITIVKPQESAHRRMEPPASKVPEVPTAPATDAAPKRVEIQMPKPAEAPTAPSPAQTLENSEPAPVSQLQSRLEPKPQPPVAEATPRSQEATEAAPSCVGDMADTPRDAGLKQAPASRNEKAPVDFGYVGIDSILEQMRRKAMKQGFEFNIMVVGQSGLGKSTLINTLFKSKISRKSVQPTSEERIPKTIEIKSITHDIEEKGVRMKLTVIDTPGFGDHINNENCWQPIMKFINDQYEKYLQEEVNINRKKRIPDTRVHCCLYFIPATGHSLRPLDIEFMKRLSKVVNIVPVIAKADTLTLEERVHFKQRITADLLSNGIDVYPQKEFDEDSEDRLVNEKFREMIPFAVVGSDHEYQVNGKRILGRKTKWGTIEVENTTHCEFAYLRDLLIRTHMQNIKDITSSIHFEAYRVKRLNEGSSAMANGMEEKEPEAPEM

SEQ ID NO: 760 - protein, 314 aa, Homo Sapiens
MQNVINTVKGKALEVAEYLTPVLKESKFKETGVITPEEFVAAGDHLVHHCPTWQWATGEELKVKAYLPTGKQFLVTKNVPCYKRCKQMEYSDELEAIIEEDDGDGGWVDTYHNTGITGITEAVKEITLENKDNIRLQDCSALCEEEEDEDEGEAADMEEYEESGLLETDEATLDTRKIVEACKAKTDAGGEDAILQTRTYDLYITYDKYYQTPRLWLFGYDEQRQPLTVEHMYEDISQDHVKKTVTIENHPHLPPPPMCSVHPCRHAEVMKKIIETVAEGGGELGVHMYLLIFLKFVQAVIPTIEYDYTRHFTM

SEQ ID NO: 761 - protein, 418 aa, Homo Sapiens
MPSSVSWGILLLAGLCCLVPVSLAEDPQGDAAQKTDTSHHDQDHPTFNKITPNLAEFAFSLYRQLAHQSNSTNIFFSPVSIATAFAMLSLGTKADTHDEILEGLNFNLTEIPEAQIHEGFQELLRTLNQPDSQLQLTTGNGLFLSEGLKLVDKFLEDVKKLYHSEAFTVNFGDTEEAKKQINDYVEKGTQGKIVDLVKELDRDTVFALVNYIFFKGKWERPFEVKDTEEEDFHVDQVTTVKVPMMKRLGMFNIQHCKKLSSWVLLMKYLGNATAIFFLPDEGKLQHLENELTHDIITKFLENEDRRSASLHLPKLSITGTYDLKSVLGQLGITKVFSNGADLSGVTEEAPLKLSKAVHKAVLTIDEKGTEAAGAMFLEAIPMSIPPEVKFNKPFVFLMIEQNTKSPLFMGKVVNPTQK

SEQ ID NO: 762 - protein, 259 aa, Homo Sapiens
MEDSMDMDMSPLRPQNYLFGCELKADKDYHFKVDNDENEHQLSLRTVSLGAGAKDELHIVEAEAMNYEGSPIKVTLATLKMSVQPTVSLGGFEITPPVVLRLKCGSGPVHISGQHLVAVEEDAESEDEEEEDVKLLSISGKRSAPGGGSKVPQKKVKLAADEDDDDDDEEDDDEDDDDDDFDDEEAEEKAPVKKSIRDTPAKNAQKSNQNGKDSKPSSTPRSKGQESFKKQEKTPKTPKGPSSVEDIKAKMQASIEKAH

SEQ ID NO: 763 - protein, 181 aa, Homo Sapiens
MGGFFSSIFSSLFGTREMRILILGLDGAGKTTILYRLQVGEVVTTIPTIGFNVETVTYKNLKFQVWDLGGQTSIRPYWRCYYSNTDAVIYVVDSCDRDRIGISKSELVAMLEEEELRKAILVVFANKQDMEQAMTSSEMANSLGLPALKDRKWQIFKTSATKGTGLDEAMEWLVETLKSRQ

SEQ ID NO: 764 - protein, 181 aa, Homo Sapiens
MPKGGRKGGHKGRARQYTSPEEIDAQLQAEKQKAREEEEQKEGGDGAAGDPKKEKKSLDSDESEDEEDDYQQKRKGVEGLIDIENPNRVAQTTKKVTQLDLDGPKELSRREREEIEKQKAKERYMKMHLAGKTEQAKADLARLAIIRKQREEAARKKEEERKAKDDATLSGKRMQSLSLNK

SEQ ID NO: 765 - protein, 732 aa, Homo Sapiens
MTEGTCLRRRGGPYKTEPATDLGRWRLNCERGRQTWTYLQDERAGREQTGLEAYALGLDTKNYFKDLPKAHTAFEGALNGMTFYVGLQAEDGHWTGDYGGPLFLLPGLLITCHVARIPLPAGYREEIVRYLRSVQLPDGGWGLHIEDKSTVFGTALNYVSLRILGVGPDDPDLVRARNILHKKGGAVAIPSWGKFWLAVLNVYSWEGLNTLFPEMWLFPDWAPAHPSTLWCHCRQVYLPMSYCYAVRLSAAEDPLVQSLRQELYVEDFASIDWLAQRNNVAPDELYTPHSWLLRVVYALLNLYEHHHSAHLRQRAVQKLYEHIVADDRFTKSISIGPISKTINMLVRWYVDGPASTAFQEHVSRIPDYLWMGLDGMKMQGTNGSQIWDTAFAIQALLEAGGHHRPEFSSCLQKAHEFLRLSQVPDNPPDYQKYYRQMRKGGFSFSTLDCGWIVSDCTAEALKAVLLLQEKCPHVTEHIPRERLCDAVAVLLNMRNPDGGFATYETKRGGHLLELLNPSEVFGDIMIDYTYVECTSAVMQALKYFHKRFPEHRAAEIRETLTQGLEFCRRQQRADGSWEGSWGVCFTYGTWFGLEAFACMGQTYRDGTACAEVSRACDFLLSRQMADGGWGEDFESCEERRYLQSAQSQIHNTCWAMMGLMAVRHPDIEAQERGVRCLLEKQLPNGDWPQENIAGVFNKSCAISYTSYRNIFPIWALGRFSQLYPERALAGHP

SEQ ID NO: 766 - protein, 258 aa, Homo Sapiens
MDILDQGALQRLFKKYSFMAVIHFAGLKAVGESVQKPLDYYRVNLTGTIQLLEIMKAHGVKNLVFSSSATVYGNPQYLPLDEAHPTGGCTNPYGKSKFFIEEMIRDLCQADKTWNAVLLRYFNPTGAHASGCIGEDPQGIPNNLMPYVSQVAIGRREALNVFGNDYDTEDGTGVRDYIHVVDLAKGHIAALRKLKEQCGCRIPYKVVARREGDVAACYANPSLAQEELGWTAALGLDRMCEDLWRWQKQNPSGFGTQA

SEQ ID NO: 767 - protein, 292 aa, Homo Sapiens
MSGGGVIRGPAGNNDCRIYVGNLPPDIRTKDIEDVFYKYGAIRDIDLKNRRGGPPFAFVEFEDPRDAEDAVYGRDGYDYDGYRLRVEFPRSGRGTGRGGGGGGGGGAPRGRYGPPSRRSENRVVVSGLPPSGSWQDLKDHMREAGDVCYADVYRDGTGVVEFVRKEDMTYAVRKLDNTKFRSHEFCLSNREKLPTSGLKLMGPEVQVMEDLDLEAVVVAEAVAEATAGVAVTPQGEAEDHHAILPVIADLALVHKMIGDTFCRTHVVYSFPLFSTIFSFFNSNCFVQNGLKC

SEQ ID NO: 768 - protein, 239 aa, Homo Sapiens
MASEELACKLERRLRREEAEESGPQLAPLGAPAPEPKPEPEPPARAPTASADAELSAQLSRRLDINEGAARPRRCRVFNPYTEFPEFSRRLIKDLESMFKLYDAGRDGFIDLMELKLMMEKLGAPQTHLGLKSMIKEVDEDFDGKLSFREFLLIFHKAAAGELQEDSGLMALAKLSEIDVALEGVKGAKNFFEAKVQALSSASKFEAELKAEQDERKREEEERRLRQAAFQKLKANFNT

SEQ ID NO: 769 - protein, 647 aa, Homo Sapiens
MWRVCARRAQNVAPWAGLEARWTALQEVPGTPRVTSRSGPAPARRNSVTTGYGGVRALCGWTPSSGATPRNRLLLQLLGSPGRRYYSLPPHQKVPLPSLSPTMQAGTIARWEKKEGDKINEGDLIAEVETDKATVGFESLEECYMAKILVAEGTRDVPIGAIICITVGKPEDIEAFKNYTLDSSAAPTPQAAPAPTPAATASPPTPSAQAPGSSYPPHMQVLLPALSPTMTMGTVQRWEKKVGEKLSEGDLLAEIETDKATIGFEVQEEGYLAKILVPEGTRDVPLGTPLCIIVEKEADISAFADYRPTEVTDLKPQVPPPTPPPVAAVPPTPQPLAPTPSAPCPATPAGPKGRVFVSPLAKKLAVEKGIDLTQVKGTGPDGRITKKDIDSFVPSKVAPAPAAVVPPTGPGMAPVPTGVFTDIPISNIRRVIAQRLMQSKQTIPHYYLSIDVNMGEVLLVRKELNKILEGRSKISVNDFIIKASALACLKVPEANSSWMDTVIRQNHVVDVSVAVSTPAGLITPIVFNAHIKGVETIANDVVSLATKAREGKLQPHEFQGGTFTISNLGMFGIKNFSAIINPPQACILAIGASEDKLVPADNEKGFDVASMMSVTLSCDHRVVDGAVGAQWLAEFRKYLEKPITMLL

SEQ ID NO: 770 - protein, 145 aa, Homo Sapiens [sequence omitted]

SEQ ID NO: 771 - protein, 317 aa, Homo Sapiens
MWLYLAAFVGLYYLLHWYRERQVVSHLQDKYVFITGCDSGFGNLLARQLDARGLRVLAACLTEKGAEQLRGQTSDRLETVTLDVTKMESIAAATQWVKEHVGDRGLWGLVNNAGILTPITLCEWLNTEDSMNMLKVNLIGVIQVTLSMLPLVRRARGRIVNVSSILGRVAFFVGGYCVSKYGVEAFSDILRREIQHFGVKISIVEPGYFRTGMTNMTQSLERMKQSWKEAPKHIKETYGQQYFDALYNIMKEGLLNCSTNLNLVTDCMEHALTSVHPRTRYSAGWDAKFFFIPLSYLPTSLADYILTRSWPKPAQAV

SEQ ID NO: 772 - protein, 191 aa, Homo Sapiens
MQSIKCVVVGDGAVGKTCLLICYTTNAFPKEYIPTVFDNYSAQSAVDGRTVNLNLWDTAGQEEYDRLRTLSYPQTNVFVICFSIASPPSYENVRHKWHPEVCHHCPDVPILLVGTKKDLRAQPDTLRRLKEQGQAPITPQQGQALAKQIHAVRYLECSALQQDGVKEVFAEAVRAVLNPTPIKRGRSCILL

SEQ ID NO: 773 - protein, 627 aa, Homo Sapiens
MVVQPDRIRCGAETTVYVIVRCKLDDRVATEAEFSPEDSPSVRMEAKVENEYTISVKAPNLSSGNVSLKIYSGDLVVCETVISYYTDMEEIGNLLSNAANPVEFMCQAFKIVPYNTETLDKLLTESLKNNIPASGLHLFGINQLEEEDMMTNQRDEELPTLLHFAAKYGLKNLTALLLTCPGALQAYSVANKHGHYPNTIAEKHGFRDLRQFIDEYVETVDMLKSHIKEELMHGEEADAVYESMAHLSTDLLMKCSLNPGCDEDLYESMAAFVPAATEDLYVEMLQASTSNPIPGDGFSRATKDSMIRKFLEGNSMGMTNLERDQCHLGQEEDVYHTVDDDEAFSVDLASRPPVPVPRPETTAPGAHQLPDNEPYIFKVFAEKSQERPGNFYVSSESIRKGPPVRPWRDRPQSSIYDPFAGMKTPGQRQLITLQEQVKLGIVNVDEAVLHFKEWQLNQKKRSESFRFQQENLKRLRDSITRRQREKQKSGKQTDLEITVPIRHSQHLPAKVEFGVYESGPRKSVIPPRTELRRGDWKTDSTSSTASSTSNRSSTRSLLSVSSGMEGDNEDNEVPEVTRSRSPGPPQVDGTPTMSLERPPRVPPRAASQRPPTRETFHPPPPVPPRGR

SEQ ID NO: 774 - protein, 404 aa, Homo Sapiens [sequence omitted]

SEQ ID NO: 775 - protein, 295 aa, Homo Sapiens
MSGALDVLQMKEEDVLKFLAAGTHLGGTNLDFQMEQYIYKRKSDGIYIINLKRTWEKLLLTARAIVAIENPADVSVISSRNTGQRAVLKFAAATGATPIAGRFTPGTFTNQIQAAFREPRLLVVSDPRADHQPLTEASYVNLPTIALCNTDSPLHYVDIAIPCNNKGTHSVGLMWWMLAREVLRMRGTISREHPWEVMPDLYFYRDPEEIEKEEQAAAEKAMTREELQGEWTAPAPEFTATQPEVADWSEGVQVPSVPIQQFPTEDWSTQRATEDWSAAPTAQATEWVGATTDWS

SEQ ID NO: 776 - protein, 783 aa, Homo Sapiens
MPGKLRSDAGLESDTAMKKGETLRKQTEEKEKKEKPKSDKTEEIAEEEETVFPKAKQVKKKAEPSEVDMNSPKSKKAKKKEEPSQNDISPKTKSLRKKKEPIEKKVVSSKTKKVTKNEEPSEEEIDAPKPKKMKKEKEMNGETREKSPKLKNGFPHPEPDCNPSEAASEESNSEIEQEIPVEQKEGAFSNFPISEETIKLLKGRGVTFLFPIQAKTFHHVYSGKDLIAQARTGTGKTFSFAIPLIEKLHGELQDRKRGRAPQVLVLAPTRELANQVSKDFSDITKKLSVACFYGGTPYGGQFERMRNGIDILVGTPGRIKDHIQNGKLDLTKLKHVVLDEVDQMLDMGFADQVEEILSVAYKKDSEDNPQTLLFSATCPHWVFNVAKKYMKSTYEQVDLIGKKTQKTAITVEHLAIKCHWTQRAAVIGDVIRVYSGHQGRTIIFCETKKEAQELSQNSAIKQDAQSLHGDIPQKQREITLKGFRNGSFGVLVATNVAARGLDIPEVDLVIQSSPPKDVESYIHRSGRTGRAGRTGVCICFYQHKEEYQLVQVEQKAGIKFKRIGVPSATEIIKASSKDAIRLLDSVPPTAISHFKQSAEKLIEEKGAVEALAAALAHISGATSVDQRSLINSNVGFVTMILQCSIEMPNISYAWKELKEQLGEEIDSKVKGMVFLKGKLGVCFDVPTASVTEIQEKWHDSRRWQLSVATEQPELEGPREGYGGFRGQREGSRGFRGQRDGNRRFRGQREGSRGPRGQRSGGGNKSNRSQNKGQKRSFSKAFGQ

SEQ ID NO: 777 - protein, 780 aa, Homo Sapiens
MAPYSLLVTRLQKALGVRQYHVASVLCQRAKVAMSHFEPNEYIHYDLLEKNINIVRKRLNRPLTLSEKIVYGHLDDPASQEIERGKSYLRLRPDRVAMQDATAQMAMLQFISSGLSKVAVPSTIHCDHLIEAQVGGEKDLRRAKDINQEVYNFLATAGAKYGVGFWKPGSGIIHQIILENYAYPGVLLIGTDSHTPNGGGLGGICIGVGGADAVDVMAGIPWELKCPKVIGVKLTGSLSGWSSPKDVILKVAGILTVKGGTGAIVEYHGPGVDSISCTGMATICNMGAEIGATTSVFPYNHRMKKYLSKTGREDIANLADEFKDHLVPDPGCHYDQLIEINLSELKPHINGPFTPDLAHPVAEVGKVAEKEGWPLDIRVGLIGSCTNSSYEDMGRSAAVAKQALAHGLKCKSQFTITPGSEQIRATIERDGYAQILRDLGGIVLANACGPCIGQWDRKDIKKGEKNTIVTSYNRNFTGRNDANPETHAFVTSPEIVTALAIAGTLKFNPETDYLTGTDGKKFRLEAPDADELPKGEFDPGQDTYQHPPKDSSGQHVDVSPTSQRLQLLEPFDKWDGKDLEDLQILIKVKGKCTTDHISAAGPWLKFRGHLDNISNNLLIGAINIENGKANSVRNAVTQEFGPVPDTARYYKKHGIRWVVIGDENYGEGSSREHAALEPRHLGGRAIITKSFARIHETNLKKQGLLPLTFADPADYNKIHPVDKLTIQGLKDFTPGKPLKCIIKHPNGTQETILLNHTFNETQIEWFRAGSALNRMKELQQ

SEQ ID NO: 778 - protein, 255 aa, Homo Sapiens
MAELRVLVAVKRVIDYAVKIRVKPDRTGVVTDGVKHSMNPFCEIAVEEAVRLKEKKLVKEVIAVSCGPAQCQETIRTALAMGADRGIHVEVPPAEAERLGPLQVARVLAKLAEKEKVDLVLLGKQAIDDDCNQTGQMTAGFLDWPQGTFASQVTLEGDKLKVEREIDGGLETLRLKLPAVVTADLRLNEPRYATLPNIMKAKKKKIEVIKPGDLGVDLTSKLSVISVEDPPQRTAGVKVETTEDLVAKLKEIGRI

SEQ ID NO: 779 - protein, 168 aa, Homo Sapiens
MTATLRPYLSAVRATLQAALCLENFSSQVVERHNKPEVEVRSSKELLLQPVTISRNEKEKVLIEGSINSVRVSIAVKQADEIEKILCHKFMRFMMMRAENFFILRRKPVEGYDISFLITNFHTEQMYKHKLVDFVIHFMEEIDKEISEMKLSVNARARIVAEEFLKNF

SEQ ID NO: 780 - protein, 514 aa, Homo Sapiens
MTLIWRHLLRPLCLVTSAPRILEMHPFLSLGTSRTSVTKLSLHTKPRMPPCDFMPERYQSLGYNRVLEIHKEHLSPVVTAYFQKPLLLHQGHMEWLFDAEGSRYLDFFSGIVTVSVGHCHPKVNAVAQKQLGRLWHTSTVFFHPPMHEYAEKLAALLPEPLKVIFLVNSGSEANELAMLMARAHSNNIDIISFRGAYHGCSPYTLGLTNVGTYKMELPGGTGCQPTMCPDVFRGPWGGSHCRDSPVQTIRKCSCAPDCCQAKDQYIEQFKDTLSTSVAKSIAGFFAEPIQGVNGVVQYPKGFLKEAFELVRARGGVCIADEVQTGFGRLGSHFWGFQTHDVLPDIVTMAKGIGNGFPMAAVITTPEIAKSLAKCLQHFNTFGGNPMACAIGSAVLEVIKEENLQENSQEVGTYMLLKFAKLRDEFEIVGDVRGKGLMIGIEMVQDKISCRPLPREEVNQIHEDCKHMGLLVGRGSIFSQTFRIAPSMCITKPEVDFAVEVFRSALTQHMERRAK

SEQ ID NO: 781 - protein, 51 aa, Homo Sapiens
MASSMRSLFSDHGKYVESFRRFLNHSTEHQCMQEFMDKKLPGIIGRYQNCC

SEQ ID NO: 782 - protein, 241 aa, Homo Sapiens
MSGESARSLGKGSAPPGPVPEGSIRIYSMRFCPFAERTRLVLKAKGIRHEVININLKNKPEWFFKKNPFGLVPVLENSQGQLIYESAITCEYLDEAYPGKKLLPDDPYEKACQKMILELFSKVPSLVGSFIRSQNKEDYAGLKEEFRKEFTKLEEVLTNKKTTFFGGNSISMIDYLIWPWFERLEAMKLNECVDHTPKLKLWMAAMKEDPTVSALLTSEKDWQGFLELYLQNSPEACDYGL

SEQ ID NO: 783 - protein, 520 aa, Homo Sapiens
MPQLSLSSLGLWPMAASPWLLLLLVGASWLLARILAWTYTFYDNCCRLRCFPQPPKRNWFLGHLGLIHSSEEGLLYTQSLACTFGDMCCWWVGPWHAIVRIFHPTYIKPVLFAPAAIVPKDKVFYSFLKPWLGDGLLLSAGEKWSRHRRMLTPAFHFNILKPYMKIFNESVNIMHAKWQLLASEGSARLDMFEHISLMTLDSLQKCVFSFDSHCQEKPSEYIAAILELSALVTKRHQQILLYIDFLYYLTPDGQRFRRACRLVHDFTDAVIQERRRTLPSQGVDDFLQAKAKSKTLDFIDVLLLSKDEDGKKLSDEDIRAEADTFMFEGHDTTASGLSWVLYHLAKHPEYQERCRQEVQELLKDREPKEIEWDDLAQLPFLTMCIKESLRLHPPVPAVSRCCTQDIVLPDGRVIPKGIICLISVFGTHHNPAVWPDPEVYDPFRFDPKNIKERSPLAFIPFSAGPRNCIGQAFAMAEMKVVLGLTLLRFRVLPDHTEPRRKPELVLRAEGGLWLRVEPLS

SEQ ID NO: 784 - protein, 451 aa, Homo Sapiens [sequence omitted]

SEQ ID NO: 785 - protein, 418 aa, Homo Sapiens
MAGRLPACVVDCGTGYTKLGYAGNTEPQFIIPSCIAIKESAKVGDQAQRRVMKGVDDLDFFIGDEAIEKPTYATKWPIRHGIVEDWDLMERFMEQVIFKYLRAEPEDHYFLLTEPPLNTPENREYTAEIMFESFNVPGLYIAVQAVLALAASWTSRQVGERTLTGTVIDSGDGVTHVIPVAEGYVIGSCIKHIPIAGRDITYFIQQLLRDREVGIPPEQSLETAKAVKERYSYVCPDLVKEFNKYDTDGSKWIKQYTGINAISKKEFSIDVGYERFLGPEIFFHPEFANPDFTQPISEVVDEVIQNCPIDVRRPLYKNIVLSGGSTMFRDFGRRLQRDLKRTVDARLKLSEELSGGRLKPKPIDVQVITHHMQRYAVWFGGSMLASTPEFYQVCHTKKDYEEIGPSICRHNPVFGVMS

SEQ ID NO: 786 - protein, 453 aa, Homo Sapiens
MSWSLHPRNLILYFYALLFLSSTCVAYVATRDNCCILDERFGSYCPTTCGIADFLSTYQTKVDKDLQSLEDILHQVENKTSEVKQLIKAIQLTYNPDESSKPNMIDAATLKSRKMLEEIMKYEASILTHDSSIRYLQEIYNSNNQKIVNLKEKVAQLEAQCQEPCKDTVQIHDITGKDCQDIANKGAKQSGLYFIKPLKANQQFLVYCEIDGSGNGWTVFQKRLDGSVDFKKNWIQYKEGFGHLSPTGTTEFWLGNEKIHLISTQSAIPYALRVELEDWNGRTSTADYAMFKVGPEADKYRLTYAYFAGGDAGDAFDGFDFGDDPSDKFFTSHNGMQFSTWDNDNDKFEGNCAEQDGSGWWMNKCHAGHLNGVYYQGGTYSKASTPNGYDNGIIWATWKTRWYSMKKTTMKIIPFNRLTIGEGQQHHLGGAKQVRPEHPAETEYDSLYPEDDL

SEQ ID NO: 787 - protein, 1231 aa, Homo Sapiens
MVLLWEPAGAWLALGLALALGPSVAAAAPRQDCTGVECPPLENCIEEALEPGACCATCVQQGCACEGYQYYDCLQGGFVRGRVPAGQSYFVDFGSTECSCPPGGGKISCQFMLCPELPPNCIEAVVVADSCPQCGQVGCVHAGHKYAAGHTVHLPPCRACHCPDAGGELICYQLPGCHGNFSDAEEGDPERHYEDPYSYDQEVAEVEAATALGGEVQAGAVQAGAGGPPAALGGGSQPLSTIQAPPWPAVLPRPTAAAALGPPAPVQAKARRVTEDSEEEEEEEEEREEMAVTEQLAAGGHRGLDGLPTTAPAGPSLPIQEERAEAGARAEAGARPEENLILDAQATSRSTGPEGVTHAPSLGKAALVPTQAVPGSPRDPVKPSPHNILSTSLPDAAWIPPTREVPRKPQVLPHSHVEEDTDPNSVHSIPRSSPEGSTKDLIETCCAAGQQWAIDNDECLEIPESGTEDNVCRTAQRHCCVSYLQEKSCMAGVLGAKEGETCGAEDNDSCGISLYKQCCDCCGLGLRVRAEGQSCESNPNLGYPCNHVMLSCCEGEEPLIVPEVRRPPEPAAAPRRVSEAEMAGREALSLGTEAELPNSLPGDDQDECLLLPGELCQHLCINTVGSYHCACFPGFSLQDDGRTCRPEGHPPQPEAPQEPALKSEFSQVASNTIPLPLPQPNTCKDNGPCKQVCSTVGGSAICSCFPGYAIMADGVSCEDQDECLMGAHDCSRRQFCVNTLGSFYCVNHTVLCADGYILNAHRKCVDINECVTDLHTCSRGEHCVNTLGSFHCYKALTCEPGYALKDGECEDVDECAMGTHTCQPGFLCQNTKGSFYCQARQRCMDGFLQDPEGNCVDINECTSLSEPCRPGFSCINTVGSYTCQRNPLICARGYHASDDGTKCVDVNECETGVHRCGEGQVCHNLPGSYRCDCKAGFQRDAFGRGCIDVNECWASPGRLCQHTCENTLGSYRCSCASGFLLAADGKRCEDVNECEAQRCSQECANIYGSYQCYCRQGYQLAEDGHTCTDIDECAQGAGILCTFRCLNVPGSYQCACPEQGYTMTANGRSCKDVDECALGTHNCSEAETCHNIQGSFRCLRFECPPNYVQVSKTKCERTTCHDFLECQNSPARITHYQLNFQTGLLVPAHIFRIGPAPAFTGDTIALNIIKGNEEGYFGTRRLNAYTGVVYLQRAVLEPRDFALDVEMKLWRQGSVTTFLAKMHIFFTTFAL

SEQ ID NO: 788 - protein, 494 aa, Homo Sapiens
MFEIKKICCIGAGYVGGPTCSVIAHMCPEIRVTVVDVNESRINAWNSPTLPIYEPGLKEVVESCRGKNLFFSTNIDDAIKEADLVFISVNTPTKTYGMGKGRAADLKYIEACARRIVQNSNGYKIVTEKSTVPVRAAESIRRIFDANTKPNLNLQVLSNPEFLAEGTAIKDLKNPDRVLIGGDETPEGQRAVQALCAVYEHWVPREKILTTNTWSSELSKLAANAFLAQRISSINSISALCEATGADVEEVATAIGMDQRIGNKFLKASVGFGGSCFQKDVLNLVYLCEALNLPEVARYWQQVIDMNDYQRRRFASRIIDSLFNTVTDKKIAILGFAFKKDTGDTRESSSIYISKYLMDEGAHLHIYDPKVPREQIVVDLSHPGVSEDDQVSRLVTISKDPYEACDGAHAVVICTEWDMFKELDYERIHKKMLKPAFIFDGRRVLDGLHNELQTIGFQIETIGKKVSSKRIPYAPSGEIPKFSLQDPPNKKPKV

SEQ ID NO: 789 - protein, 359 aa, Homo Sapiens
MAAVSGLVRRPLREVSGLLKRRFHWTAPAALQVTVRDAINQGMDEELERDEKVFLLGEEVAQYDGAYKVSRGLWKKYGDKRIIDTPISEMGFAGIAVGAAMAGLRPICEFMTFNFSMQAIDQVINSAAKTYYMSGGLQPVPIVFRGPNGASAGVAAQHSQCFAAWYGHCPGLKVVSPWNSEDAKGLIKSAIRDNNPVVVLENELMYGVPFEFPPEAQSKDFLIPIGKAKIERQGTHITVVSHSRPVGHCLEAAAVLSKEGVECEVINMRTIRPMDMETIEASVMKTNHLVTVEGGWPQFGVGAEICARIMEGPAFNFLDAPAVRVTGADVPMPYAKILEDNSIPQVKDIIFAIKKTLNI

SEQ ID NO: 790 - protein, 466 aa, Homo Sapiens
MSTRSVSSSSYRRMFGGPGTASRPSSSRSYVTTSTRTYSLGSALRPSTSRSLYASSPGGVYATRSSAVRLRSSVPGVRLLQDSVDFSLADAINTEFKNTRTNEKVELQELNDRFANYIDKVRFLEQQNKILLAELEQLKGQGKSRLGDLYEEEMRELRRQVDQLTNDKARVEVERDNLAEDIMRLREKLQEEMLQREEAENTLQSFRQDVDNASLARLDLERKVESLQEEIAFLKKLHEEEIQELQAQIQEQHVQIDVDVSKPDLTAALRDVRQQYESVAAKNLQEAEEWYKSKFADLSEAANRNNDALRQAKQESTEYRRQVQSLTCEVDALKGTNESLERQMREMEENFAVEAANYQDTIGRLQDEIQNMKEEMARHLREYQDLLNVKMALDIEIATYRKLLEGEESRISLPLPNFSSLNLRETNLDSLPLVDTHSKRTLLIKTVETRDGQVINETSQHHDDLE

SEQ ID NO: 791 - protein, 983 aa, Homo Sapiens
MMTSVGTNRARGNWEQPQNQNQTQHKQRPQATAEQIRLAQMISDHNDADFEEKVKQLIDITGKNQDECVIALHDCNGDVNRAINVLLEGNPDTHSWEMVGKKKGVSGQKDGGQTESNEEGKENRDRDRDYSRRRGGPPRRGRGASRGREFRGQENGLDGTKSGGPSGRGTERGRRGRGRGRGGSGRRGGRFSAQGMGTFNPADYAEPANTDDNYGNSSGNTWNNTGHFEPDDGTSAWRTATEEWGTEDWNEDLSETKIFTASNVSSVPLPAENVTITAGQRIDLAVLLGKTPSTMENDSSNLDPSQAPSLAQPLVFSNSKQTAISQPASGNTFSHHSMVSMLGKGFGDVGEAKGGSTTGSQFLEQFKTAQALAQLAAQHSQSGSTTTSSWDMGSTTQSPSLVQYDLKNPSDSAVHSPFTKRQAFTPSSTMMEVFLQEKSPAVATSTAAPPPPSSPLPSKSTSAPQMSPGSSDNQSSSPQPAQQKLKQQKKKASLTSKIPALAVEMPGSADISGLNLQFGALQFGSEPVLSDYESTPTTSASSSQAPSSLYTSTASESSSTISSNQSQESGYQSGPIQSTTYTSQNNAQGPLYEQRSTQTRRYPSSISSSPQKDLTQAKNGFSSVQATQLQTTQSVEGATGSAVKSDSPSTSSIPPLNETVSAASLLTTTNQHSSSLGGLSHSEEIPNTTTTQHSSTLSTQQNTLSSSTSSGRTSTSTLLHTSVESEANLHSSSSTFSTTSSTVSAPPPVVSVSSSLNSGSSLGLSLGSNSTVTASTRSSVATTSGKAPPNLPPGVPPLLPNPYIMAPGLLHAYPPQVYGYDDLQMLQTRFPLDYYSIPFPTPTTPLTGRDGSLASNPYSGDLTKFGRGDASSPAPATTLAQPQQNQTQTHHTTQQTFLNPALPPGYSYTSLPYYTGVPGLPSTFQYGPAVFPVAPTSSKQHGVNVSVNASATPFQQPSGYGSHGYNTGRKYPPPYKHFWTAES

SEQ ID NO: 792 - protein, 575 aa, Homo Sapiens
MSAATHSPMMQVASGNGDRDPLPPGWEIKIDPQTGWPFFVDHNSRTTTWNDPRVPSEGPKETPSSANGPSREGSRLPPAREGHPVYPQLRPGYIPIPVLHEGAENRQVHPFHVYPQPGMQRFRTEAAAAAPQRSQSPLRGMPETTQPDKQCGQVAAAAAAQPPASHGPERSQSPAASDCSSSSSSASLPSSGRSSLGSHQLPRGYISIPVIHEQNVTRPAAQPSFHQAQKTHYPAQQGEYQTHQPVYHKIQGDDWEPRPLRAASPFRSSVQGASSREGSPARSSTPLHSPSPIRVHTVVDRPQQPMTHRETAPVSQPENKPESKPGPVGPELPPGHIPIQVIRKEVDSKPVSQKPPPPSEKVEVKVPPAPVPCPPPSPGPSAVPSSPKSVATEERAAPSTAPAEATPPKPGEAEAPPKHPGVLKVEAILEKVQGLEQAVDNFEGKKTDKKYLMIEEYLTKELLALDSVDPEGRADVRQARRDGVRKVQTILEKLEQKAIDVPGQVQVYELQPSNLEADQPLQAIMEMGAVAADKGKKNAGNAEDPHTETQQPEATAAATSNPSSMTDTPGNPAAP

SEQ ID NO: 793 - protein, 218 aa, Homo Sapiens
MGTRDDEYDYLFKVVLIGDSGVGKSNLLSRFTRNEFNLESKSTIGVEFATRSIQVDGKTIKAQIWDTAGQERYRAITSAYYRGAVGALLVYDIAKHLTYENVERWLKELRDHADSNIVIMLVGNKSDLRHLRAVPTDEARAFAEKNNLSFIETSALDSTNVEEAFKNILTEIYRIVSQKQIADRAAHDESPGNNVVDISVPPTTDGQKPNKLQCCQNL

SEQ ID NO: 794 - protein, 432 aa, Homo Sapiens
MASPVAAQAGKLLRALALRPRFLAAGSQAVQLTSRRWLNLQEYQSKKLMSDNGVRVQRFFVADTANEALEAAKRLNAKEIVLKAQILAGGRGKGVFNSGLKGGVHLTKDPNVVGQLAKQMIGYNLATKQTPKEGVKVNKVMVAEALDISRETYLAILMDRSCNGPVLVGSPQGGVDIEEVAASNPELIFKEQIDIFEGIKDSQAQRMAENLGFVGPLKSQAADQITKLYNLFLKIDATQVEVNPFGETPEGQVVCFDAKINFDDNAEFRQKDIFAMDDKSENEPIENEAAKYDLKYIGLDGNIACFVNGAGLAMATCDIIFLNGGKPANFLDLGGGVKEAQVYQAFKLLTADPKVEAILVNIFGGIVNCAIIANGITKACRELELKVPLVVRLEGTNVQEAQKILNNSGLPITSAIDLEDAAKKAVASVAKK

SEQ ID NO: 795 - protein, 778 aa, Homo Sapiens
MPAFLGLKCLGKLCSSEKSKVTSSERTSARGSNRKRLIVEDRRVSGTSFTAHRRATITHLLYLCPKDYCPRGRVCNSVDPFVAHPQDPHHPSEKPVIHCHKCGEPCKGEVLRVQTKHFHIKCFTCKVCGCDLAQGGFFIKNGEYLCTLDYQRMYGTRCHGCGEFVEGEVVTALGKTYHPNCFACTICKRPFPPGDRVTFNGRDCLCQLCAQPMSSSPKETTFSSNCAGCGRDIKNGQALLALDKQWHLGCFKCKSCGKVLTGEYISKDGAPYCEKDYQGLFGVKCEACHQFITGKVLEAGDKHYHPSCARCSRCNQMFTEGEEMYLQGSTVWHPDCKQSTKTEEKLRPTRTSSESIYSRPGSSIPGSPGHTIYAKVDNEILDYKDLAAIPKVKAIYDIERPDLITYEPFYTSGYDDKQERQSLGESPRTLSPTPSAEGYQDVRDRMIHRSTSQGSINSPVYSRHSYTPTTSRSPQHFHRPGNEPSSGRNSPLPYRPDSRPLTPTYAQAPKHFHVPDQGINIYRKPPIYKQHAALAAQSKSSEDIIKFSKFPAAQAPDPSETPKIETDHWPGPPSFAVVGPDMKRRSSGREEDDEELLRRRQLQEEQLMKLNSGLGQLILKEEMEKESRERSSLLASRYDSPINSASHIPSSKTASLPGYGRNGLHRPVSTDFAQYNSYGDVSGGVRDYQTLPDGHMPAMRMDRGVSMPNMLEPKIFPYEMLMVTNRGRNKILREVDRTRLERHLAPEVFREIFGMSIQEFDRLPLWRRNDMKKKAKLF

SEQ ID NO: 796 - protein, 532 aa, Homo Sapiens
MAPSSPRPALPALLVLLGALFPGPGNAQTSVSPSKVILPRGGSVLVTCSTSCDQPKLLGIETPLPKKELLLPGNNRKVYELSNVQEDSQPMCYSNCPDGQSTAKTFLTVYWTPERVELAPLPSWQPVGKNLTLRCQVEGGAPRANLTVVLLRGEKELKREPAVGEPAEVTTTVLVRRDHHGANFSCRTELDLRPQGLELFENTSAPYQLQTFVLPATPPQLVSPRVLEVDTQGTVVCSLDGLFPVSEAQVHLALGDQRLNPTVTYGNDSFSAKASVSVTAEDEGTQRLTCAVILGNQSQETLQTVTIYSFPAPNVILTKPEVSEGTEVTVKCEAHPRAKVTLNGVPAQPLGPRAQLLLKATPEDNGRSFSCSATLEVAGQLIHKNQTRELRVLYGPRLDERDCPGNWTWPENSQQTPMCQAWGNPLPELKCLKDGTFPLPIGESVTVTRDLEGTYLCRARSTQGEVTRKVTVNVLSPRYEIVIITVVAAAVIMGTAGLSTYLYNRQRKIKKYRLQQAQKGTPMKPNTQATPP

SEQ ID NO: 797 - protein, 1506 aa, Homo Sapiens
MPQIIKMTRILTAFKVVRTLKTGFGFTNVTAHQKWKFSRPGIRLLSVKAQTAHIVLEDGTKMKGYSFGHPSSVAGEVVFNTGLGGYPEAITDPAYKGQILTMANPIIGNGGAPDTTALDELGLSKYLESNGIKVSGLLVLDYSKDYNHWLATKSLGQWLQEEKVPAIYGVDTRMLTKIIRDKGTMLGKIEFEGQPVDFVDPNKQNLIAEVSTKDVKVYGKGNPTKVVAVDCGIKNNVIRLLVKRGAEVHLVPWNHDFTKMEYDGILIAGGPGNPALAEPLIQNVRKILESDRKEPLFGISTGNLITGLAAGAKTYKMSMANRGQNQPVLNITNKQAFITAQNHGYALDNTLPAGWKPLFVNVNDQTNEGIMHESKPFFAVQFHPEVTPGPIDTEYLFDSFFSLIKKGKATTITSVLPKPALVASRVEVSKVLILGSGGLSIGQAGEFDYSGSQAVKAMKEENVKTVLMNPNIASVQTNEVGLKQADTVYFLPITPQFVTEVIKAEQPDGLILGMGGQTALNCGVELFKRGVLKEYGVKVLGTSVESIMATEDRQLFSDKLNEINEKIAPSFAVESIEDALKAADTIGYPVMIRSAYALGGLGSGICPNRETLMDLSTKAFAMTNQILVEKSVTGWKEIEYEVVRDADDNCVTVCNMENVDAMGVHTGDSVVVAPAQTLSNAEFQMLRRTSINVVRHLGIVGECNIQFALHPTSMEYCIIEVNARLSRSSALASKATGYPLAFIAAKIALGIPLPEIKNVVSGKTSACFEPSLDYMVTKIPRWDLDRFHGTSSRIGSSMKSVGEVMAIGRTFEESFQKALRMCHPSIEGFTPRLPMNKEWPSNLDLRKELSEPSSTRIYAIAKAIDDNMSLDEIEKLTYIDKWFLYKMRDILNMEKTLKGLNSESMTEETLKRAKEIGFSDKQISKCLGLTEAQTRELRLKKNIHPWVKQIDTLAAEYPSVTNYLYVTYNGQEHDVNFDDHGMMVLGCGPYHIGSSVEFDWCAVSSIRTLRQLGKKTVVVNCNPETVSTDFDECDKLYFEELSLERILDIYHQEACGGCIISVGGQIPNNLAVPLYKNGVKIMGTSPLQIDRAEDRSIFSAVLDELKVAQAPWKAVNTLNEALEFAKSVDYPCLLRPSYVLSGSAMNVVFSEDEMKKFLEEATRVSQEHPVVLTKFVEGAREVEMDAVGKDGRVISHAISEHVEDAGVHSGDATLMLPTQTISQGAIEKVKDATRKIAKAFAISGPFNVQFLVKGNDVLVIECNLRASRSFPFVSKTLGVDFIDVATKVMIGENVDEKHLPTLDHPIIPADYVAIKAPMFSWPRLRDADPILRCEMASTGEVACFGEGIHTAFLKAMLSTGFKIPQKGILIGIQQSFRPRFLGVAEQLHNEGFKLFATEATSDWLNANNVPATPVAWPSQEGQNPSLSSIRKLIRDGSIDLVINLPNNNTKFVHDNYVIRRTAVDSGIPLLTNFQVTKLFAEAVQKSRKVDSKSLFHYRQYSAGKAA

SEQ ID NO: 798 - protein, 601 aa, Homo Sapiens
MAGASELGTGPGAAGGDGDDSLYPIAVLIDELRNEDVQLRLNSIKKLSTIALALGVERTRSELLPFLTDTIYDEDEVLLALAEQLGNFTGLVGGPDFAHCLLPPLENLATVEETVVRDKAVESLRQISQEHTPVALEAYFVPLVKRLASGDWFTSRTSACGLFSVCYPRASNAVKAEIRQQFRSLCSDDTPMVRRAAASKLGEFAKVLELDSVKSEIVPLFTSLASDEQDSVRLLAVEACVSIAQLLSQDDLETLVMPTLRQAAEDKSWRVRYMVADRFSELQKAMGPKITLNDLIPAFQNLLKDCEAEVRAAAAHKVKELGENLPIEDRETIIMNQILPYIKELVSDTNQHVKSALASVIMGLSTILGKENTIEHLLPLFLAQLKDECPDVRLNIISNLDCVNEVIGIRQLSQSLLPAIVELAEDAKWRVRLAIIEYMPLLAGQLGVEFFDEKLNSLCMAWLVDHVYAIREAATNNLMKLVQKFGTEWAQNTIVPKVLVMANDPNYLHRMTTLFCINALSEACGQEITTKQMLPIVLKMAGDQVANVRFNVAKSLQKIGPILDTNALQGEVKPVLQKLGQDEDMDVKYFAQEAISVLALA

SEQ ID NO: 799 - protein, 594 aa, Homo Sapiens
MWCLLRGLGRPGALARGALGQQQSLGARALASAGSESRDEYSYVVVGAGSAGCVLAGRLTEDPAERVLLLEAGPKDVLAGSKRLSWKIHMPAALVANLCDDRYNWCYHTEVQRGLDGRVLYWPRGRVWGGSSSLNAMVYVRGHAEDYERWQRQGARGWDYAHCLPYFRKAQGHELGASRYRGADGPLRVSRGKTNHPLHCAFLEATQQAGYPLTEDMNGFQQEGFGWMDMTIHEGKRWSAACAYLHPALSRTNLKAEAETLVSRVLFEGTRAVGVEYVKNGQSHRAYASKEVILSGGAINSPQLLMLSGIGNADDLKKLGIPVVCHLPGVGQNLQDHLEIYIQQACTRPITLHSAQKPLRKVCIGLEWLWKFTGEGATAHLETGGFIRSQPGVPHPDIQFHFLPSQVIDHGRVPTQQEAYQVHVGPMRGTSVGWLKLRSANPQDHPVIQPNYLSTETDIEDFRLCVKLTREIFAQEALAPFRGKELQPGSHIQSDKEIDAFVRAKADSAYHPSCTCKMGQPSDPTAVVDPQTRVLGVENLRVVDASIMPSMVSGNLNAPTIMIAEKAADIIKGQPALWDKDVPVYKPRTLATQR

SEQ ID NO: 800 - protein, 781 aa, Homo Sapiens
MSSECDGGSKAVMNGLAPGSNGQDKATADPLRARSISAVKIIPVKTVKNASGLVLPTDMDLTKICTGKGAVTLRASSSYRETPSSSPASPQETRQHESKPGLEPEPSSADEWRLSSSADANGNAQPSSLAAKGYRSVHPNLPSDKSQDSSPLLNEVSSSLIGTDSQAFPSVSKPSSAYPSTTIVNPTIVLLQHNREQQKRLSSLSDPVSERRVGEQDSAPTQEKPTSPGKAIEKRAKDDSRRVVKSTQDLSDVSMDEVGIPLRNTERSKDWYKTMFKQIHKLNRDDDSDLYSPRYSFSEDTKSPLSVPRSKSEMSYIDGEKVVKRSATLPLPARSSSLKSSSERNDWEPPDKKVDTRKYRAEPKSIYEYQPGKSSVLTNEKMSSAISPTPEISSETPGYIYSSNFHAVKRESDGAPGDLTSLENERQIYKSVLEGGDIPLQGLSGLKRPSSSASTKDSESPRHFIPADYLESTEEFIRRRHDDKEKLLADQRRLKREQEEADIAARRHTGVIPTHHQFITNERFGDLLNIDDTAKRKSGSEMRPARAKFDFKAQTLKELPLQKGDIVYIYKQIDQNWYEGEHHGRVGIFPRTYIELLPPAEKAQPKKLTPVQVLEYGEAIAKFNFNGDTQVEMSFRKGERITLLRQVDENWYEGRIPGTSRQGIFPITYVDVIKRPLVKNPVDYMDLPFSSSPSRSATASPQQPQAQQRRVTPDRSQTSQDLFSYQALYSYIPQNDDELELRDGDIVDVMEKCDDGWFVGTSRRTKQFGTFPGNYVKPLYL

SEQ ID NO: 801 - protein, 317 aa, Homo Sapiens
MPREDRATWKSNYFLKIIQLLDDYPKCFIVGADNVGSKQMQQIRMSLRGKAVVLMGKNTMMRKAIRGHLENNPALEKLLPHIRGNVGFVFTKEDLTEIRDMLLANKVPAAARAGAIAPCEVTVPAQNTGLGPEKTSFFQALGITTKISRGTIEILSDVQLIKTGDKVGASEATLLNMLNISPFSFGLVIQQVFDNGSIYNPEVLDITEETLHSRFLEGVRNVASVCLQIGYPTVASVPHSIINGYKRVLALSVETDYTFPLAEKVKAFLADPSAFVAAAPVAAATTAAPAAAAAPAKVEAKEESEESDEDMGFGLFD

SEQ ID NO: 802 - protein, 236 aa, Homo Sapiens
MSAKSRTIGIIGAPFSKGQPRGGVEEGPTVLRKAGLLEKLKEQECDVKDYGDLPFADIPNDSPFQIVKNPRSVGKASEQLAGKVAEVKKNGRISLVLGGDHSLAIGSISGHARVHPDLGVIWVDAHTDINTPLTTTSGNLHGQPVSFLLKELKGKIPDVPGFSWVTPCISAKDIVYIGLRDVDPGEHYILKTLGIKYFSMTEVTRTVNTAVAITLACFGLAREGNHKPIDYLNPPK

SEQ ID NO: 803 - protein, 166 aa, Homo Sapiens
MASGVTVNDEVIKVFNDMKVRKSSTQEEIKKRKKAVLFCLSDDKRQIIVEEAKQILVGDIGDTVEDPYTSFVKLLPLNDCRYALYDATYETKESKKEDLVFIFWAPESAPLKSKMIYASSKDAIKKKFTGIKHEWQVNGLDDIKDRSTLGEKLGGNVVVSLEGKPL

SEQ ID NO: 804 - protein, 1204 aa, Homo Sapiens
MAMDQVNALCEQLVKAVTVMMDPNSTQRYRLEALKFCEEFKEKCPICVPCGLRLAEKTQVAIVRHFGLQILEHVVKFRWNGMSRLEKVYLKNSVMELIANGTLNILEEENHIKDALSRIVVEMIKREWPQHWPDMLIELDTLSKQGETQTELVMFILLRLAEDVVTFQTLPPQRRRDIQQTLTQNMERIFSFLLNTLQENVNKYQQVKTDTSQESKAQANCRVGVAALNTLAGYIDWVSMSHITAENCKLLEILCLLLNEQELQLGAAECLLIAVSRKGKLEDRKPLMVLFGDVAMHYILSAAQTADGGGLVEKHYVFLKRLCQVLCALGNQLCALLGADSDVETPSNFGKYLESFLAFTTHPSQFLRSSTQMTWGALFRHEILSRDPLLLAIIPKYLRASMTNLVKMGFPSKTDSPSCEYSRFDFDSDEDFNAFFNSSRAQQGEVMRLACRLDPKTSFQMAGEWLKYQLSTFLDAGSVNSCSAVGTGEGSLCSVFSPSFVQWEAMTLFLESVITQMFRTLNREEIPVNDGIELLQMVLNFDTKDPLILSCVLTNVSALFPFVTYRPEFLPQVFSKLFSSVTFETVEESKAPRTRAVRNVRRHACSSIIKMCRDYPQLVLPNFDMLYNHVKQLLSNELLLTQMEKCALMEALVLISNQFKNYERQKVFLEELMAPVASIWLSQDMHRVLSDVDAFIAYVGTDQKSCDPGLEDPCGLNRARMSFCVYSILGVVKRTCWPTDLEEAKAGGFVVGYTSSGNPIFRNPCTEQILKLLDNLLALIRTHNTLYAPEMLAKMAEPFTKALDMLDAEKSAILGLPQPLLELNDSPVFKTVLERMQRFFSTLYENCFHILGKAGPSMQQDFYTVEDLATQLLSSAFVNLNNIPDYRLRPMLRVFVKPLVLFCPPEHYEALVSPILGPLFTYLHMRLSQKWQVINQRSLLCGEDEAADENPESQEMLEEQLVRMLTREVMDLITVCCVSKKGADHSSAPPADGDDEEMMATEVTPSAMAELTDLGKCLMKHEDVCTALLITAFNSLAWKDTLSCQRTTSQLCWPLLKQVLSGTLLADAVTWLFTSVLKGLQMHGQHDGCMASLVHLAFQIYEALRPRYLEIRAVMEQIPEIQKDSLDQFDCKLLNPSLQKVADKRRKDQFKRLIAGCIGKPLGEQFRKEVHIKNLPSLFKKTKPMLETEVLDNDGGGLATIFEP

SEQ ID NO: 805 - protein, 475 aa, Homo Sapiens
MADMQNLVERLERAVGRLEAVSHTSDMHRGYADSPSKAGAAPYVQAFDSLLAGPVAEYLKISKEIGGDVQKHAEMVHTGLKLERALLVTASQCQQPAENKLSDLLAPISEQIKEVITFREKNRGSKLFNHLSAVSESIQALGWVAMAPKPGPYVKEMNDAAMFYTNRVLKEYKDVDKKHVDWVKAYLSIWTELQAYIKEFHTTGLAWSKTGPVAKELSGLPSGPSAGSCPPPPPPCPPPPPVSTISCSYESASRSSLFAQINQGESITHALKHVSDDMKTHKNPALKAQSGPVRSGPKPFSAPKPQTSPSPKRATKKEPAVLELEGKKWRVENQENVSNLVIEDTELKQVAYIYKCVNTTLQIKGKINSITVDNCKKLGLVFDDVVGIVEIINSKDVKVQVMGKVPTISINKTDGCHAYLSKNSLDCEIVSAKSSEMNVLIPTEGGDFNEFPVPEQFKTLWNGQKLVTTVTEIAG

SEQ ID NO: 806 - protein, 564 aa, Homo Sapiens
MASTSTTIRSHSSSRRGFSANSARLPGVSRSGFSSISVSRSRGSGGLGGACGGAGFGSRSLYGLGGSKRISIGGGSCAISGGYGSRAGGSYGFGGAGSGFGFGGGAGIGFGLGGGAGLAGGFGGPGFPVCPPGGIQEVTVNQSLLTPLNLQIDPAIQRVRAEEREQIKTLNNKFASFIDKVRFLEQQNKVLDTKWTLLQEQGTKTVRQNLEPLFEQYINNLRRQLDNIVGERGRLDSELRNMQDLVEDLKNKYEDEINKRTAAENEFVTLKKDVDAAYMNKVELQAKADTLTDEINFLRALYDAELSQMQTHISDTSVVLSMDNNRNLDLDSIIAEVKAQYEEIAQRSRAEAESWYQTKYEELQITAGRHGDDLRNTKQEIAEINRMIQRLRSEIDHVKKQCANLQAAIADAEQRGEMALKDAKNKLEGLEDALQKAKQDLARLLKEYQELMNVKLALDVEIATYRKLLEGEECRLNGEGVGQVNISVVQSTVSSGYGGASGVGSGLGLGGGSSYSYGSGLGVGGGFSSSSGRATGGGLSSVGGGSSTIKYTTTSSSSRKSYKH

SEQ ID NO: 807 - protein, 464 aa, Homo Sapiens
MYSNVIGTVTSGKRKVYLLSLLLIGFWDCVTCHGSPVDICTAKPRDIPMNPMCIYRSPEKKATEDEGSEQKIPEATNRRVWELSKANSRFATTFYQHLADSKNDNDNIFLSPLSISTAFAMTKLGACNDTLQQLMEVFKFDTISEKTSDQIHFFFAKLNCRLYRKANKSSKLVSANRLFGDKSLTFNETYQDISELVYGAKLQPLDFKENAEQSRAAINKWVSNKTEGRITDVIPSEAINELTVLVLVNTIYFKGLWKSKFSPENTRKELFYKADGESCSASMMYQEGKFRYRRVAEGTQVLELPFKGDDITMVLILPKPEKSLAKVEKELTPEVLQEWLDELEEMMLVVHMPRFRIEDGFSLKEQLQDMGLVDLFSPEKSKLPGIVAEGRDDLYVSDAFHKAFLEVNEEGSEAAASTAVVIAGRSLNPNRVTFKANRPFLVFIREVPLNTIIFMGRVANPCVK

SEQ ID NO: 808 - protein, 452 aa, Homo Sapiens
MAAAALRSGWCRCPRRCLGSGIQFLSSHNLPHGSTYQMRRPGGELPLSKSYSSGNRKGFLSGLLDNVKQELAKNKEMKESIKKFRDEARRLEESDVLQEARRKYKTIESETVRTSEVLRKKLGELTGTVKESLHEVSKSDLGRKIKEGVEEAAKTAKQSAESVSKGGEKLGRTAAFRALSQGVESVKKEIDDSVLGQTGPYRRPQRLRKRTEFAGDKFKEEKVFEPNEEALGVVLHKDSKWYQQWKDFKENNVVFNRFFEMKMKYDESDNAFIRASRALTDKVTDLLGGLFSKTEMSEVLTEILRVDPAFDKDRFLKQCENDIIPNVLEAMISGELDILKDWCYEATYSQLAHPIQQAKALGLQFHSRILDIDNVDLAMGKMMEQGPVLIITFQAQLVMVVRNPKGEVVEGDPDKVLRMLYVWALCRDQDELNPYAAWRLLDISASSTEQIL

SEQ ID NO: 809 - protein, 172 aa, Homo Sapiens
MSSKKAKTKTTKKRPQRATSNVFAMFDQSQIQEFKEAFNMIDQNRDGFIDKEDLHDMLASLGKNPTDAYLDAMMNEAPGPINFTMFLTMFGEKLNGTDPEDVIRNAFACFDEEATGTIQEDYLRELLTTMGDRFTDEEVDELYREAPIDKKGNFNYIEFTRILKHGAKDKDD

SEQ ID NO: 810 - protein, 282 aa, Homo Sapiens
MNSSTSTMSEEPDALSVVNQLRDLAADPLNRRAIVQDQGCLPGLILFMDHPNPPVVHSALLALRYLAECRANREKMKGELGMMLSLQNVIQKTTTPGETKLLASEIYDILQSSNMADGDSFNEMNSRRRKAQFFLGTTNKRAKTVVLHIDGLDDTSRRNLCEEALLKIKGVISFTFQMAVQRCVVRIRSDLKAEALASAIASTKVMKAQQVVKSESGEEMLVPFQDTPVEVEQNTELPDYLPEDESPTKEQDKAVSRVGSHPEGGASWLSTAANFLSRSFYW

SEQ ID NO: 811 - protein, 371 aa, Homo Sapiens
MSSRGGKKKSTKTSRSAKAGVIFPVGRMLRYIKKGHPKYRIGVGAPVYMAAVLEYLTAEILELAGNAARDNKKGRVTPRHILLAVANDEELNQLLKGVTIASGGVLPNIHPELLAKKRGSKGKLEAIITPPPAKKAKSPSQKKPVSKKAGGKKGARKSKKQGEVSKAASADSTTEGTPADGFTVLSTKSLFLGQKLNLIHSEISNLAGFEVEAIINPTNADIDLKDDLGNTLEKKGGKEFVEAVLELRKKNGPLEVAGAAVSAGHGLPAKFVIHCNSPVWGADKCEELLEKTVKNCLALADDKKLKSIAFPSIGSGRNGFPKQTAAQLILKAISSYFVSTMSSSIKTVYFVLFDSESIGIYVQEMAKLDAN

SEQ ID NO: 812 - protein, 1247 aa, Homo Sapiens
MAQSLRLHFAARRSNTYPLSETSGDDLDSHVHMCFKRPTRISTSNVVQMKLTPRQTALAPLIKENVQSQERSSVPSSENVNKKSSCLQISLQPTRYSGYLQSSNVLADSDDASFTCILKDGIYSSAVVDNELNAVNDGHLVSSPAICSGSLSNFSTSDNGSYSSNGSDFGSCASITSGGSYTNSVISDSSSYTFPPSDDTFLGGNLPSDSTSNRSVPNRNTTPCEIFSRSTSTDPFVQDDLEHGLEIMKLPVSRNTKIPLKRYSSLVIFPRSPSTTRPTSPTSLCTLLSKGSYQTSHQFIISPSEIAHNEDGTSAKGFLSTAVNGLRLSKTICTPGEVRDIRPLHRKGSLQKKIVLSNNTPRQTVCEKSSEGYSCVSVHFTQRKAATLDCETTNGDCKPEMSEIKLNSDSEYIKLMHRTSACLPSSQNVDCQININGELERPHSQMNKNHGILRRSISLGGAYPNISCLSSLKHNCSKGGPSQLLIKFASGNEGKVDNLSRDSNRDCTNELSNSCKPGWVVLDQPDAACHLQQQQEPSPLPPGWEERQDILGRTYYVNHESRRTQWKRPTPQDNLTDAENGNIQLQAQRAFTTRRQISEETESVDNRESSENWEIIREDEATMYSNQAFPSPPPSSNLDVPTHLAEELNARLTIFGNSAVSQPASSSNHSSRRGSLQAYTFEEQPTLPVLLPTSSGLPPGWEEKQDERGRSYYVDHNSRTTTWTKPTVQATVETSQLTSSQSSAGPQSQASTSDSGQQVTQPSEIEQGFLPKGWEVRHAPNGRPFFIDHNTKTTTWEDPRLKIPAHLRGKTSLDTSNDLGPLPPGWEERTHTDGRIFYINHNIKRTQWEDPRLENVAITGPAVPYSRDYKRKYEFFRRKLKKQNDIPNKFEMKLRRATVLEDSYRRIMGVKRADFLKARLWIEFDGEKGLDYGGVAREWFFLISKEMFNPYYGLFEYSATDNYTLQINPNSGLCNEDHLSYFKFIGRVAGMAVYHGKLLDGFFIRPFYKMMLHKPITLHDMESVDSEYYNSLRWILENDPTELDLRFIIDEELFGQTHQHELKNGGSEIVVTNKNKKEYIYLVIQWRFVNRIQKQMAAFKEGFFELIPQDLIKIFDENELELLMCGLGDVDVNDWREHTKYKNGYSANHQVIQWFWKAVLMMDSEKRIRLLQFVTGTSRVPMNGFAELYGSNGPQSFTVEQWGTPEKLPRAHTCFNRLDLPPYESFEELWDKLQMAIENTQGFDGVD

SEQ ID NO: 813 - protein, 767 aa, Homo Sapiens
MGRRSRGRRLQQQQRPEDAEDGAEGGGKRGEAGWEGGYPEIVKENKLFEHYYQELKIVPEGEWGQFMDALREPLPATLRITGYKSHAKEILHCLKNKYFKELEDLEVDGQKVEVPQPLSWYPEELAWHTNLSRKILRKSPHLEKFHQFLVSETESGNISRQEAVSMIPPLLLNVRPHHKILDMCAAPGSKTTQLIEMLHADMNVPFPEGFVIANDVDNKRCYLLVHQAKRLSSPCIMVVNHDASSIPRLQIDVDGRKEILFYDRILCDVPCSGDGTMRKNIDVWKKWTTLNSLQLHGLQLRIATRGAEQLAEGGRMVYSTCSLNPIEDEAVIASLLEKSEGALELADVSNELPGLKWMPGITQWKVMTKDGQWFTDWDAVPHSRHTQIRPTMFPPKDPEKLQAMHLERCLRILPHHQNTGGFFVAVLVKKSSMPWNKRQPKLQGKSAETRESTQLSPADLTEGKPTDPSKLESPSFTGTGDTEIAHATEDLENNGSKKDGVCGPPPSKKMKLFGFKEDPFVFIPEDDPLFPPIEKFYALDPSFPRMNLLTRTTEGKKRQLYMVSKELRNVLLNNSEKMKVINTGIKVWCRNNSGEEFDCAFRLAQEGIYTLYPFINSRIITVSMEDVKILLTQENPFFRKLSSETYSQAKDLAKGSIVLKYEPDSANPDALQCPIVLCGWRGKASIRTFVPKNERLHYLRMMGLEVLGEKKKEGVILTNESAASTGQPDNDVTEGQRAGEPNSPDAEEANSPDVTAGCDPAGVHPPR

SEQ ID NO: 814 - protein, 356 aa, Homo Sapiens
MNAARTGYRVFSANSTAACTELAKRITERLGAELGKSVVYQETNGETRVEIKESVRGQDIFIIQTIPRDVNTAVMELLIMAYALKTACARNIIGVIPYFPYSKQSKMRKRGSIVCKLLASMLAKAGLTHIITMDLHQKEIQGFFSFPVDNLRASPFLLQYIQEEIPNYRNAVIVAKSPDAAKRAQSYAERLRLGLAVIHGEAQCTELDMDDGRHSPPMVKNATVHPGLELPLMMAKEKPPITVVGDVGGRIAIIVDDIIDDVESFVAAAEILKERGAYKIYVMATHGILSAEAPRLIEESSVDEVVVTNTVPHEVQKLQCPKIKTVDISLILSEAIRRIHNGESMAYLFRNITVDD

SEQ ID NO: 815 - protein, 277 aa, Homo Sapiens
MSDQQLDCALDLMRRLPPQQIEKNLSDLIDLVPSLCEDLLSSVDQPLKIARDKVVGKDYLLCDYNRDGDSYRSPWSNKYDPPLEDGAMPSARLRKLEVEANNAFDQYRDLYFEGGVSSVYLWDLDHGFAGVILIKKAGDGSKKIKGCWDSIHVVEVQEKSSGRTAHYKLTSTVMLWLQTNKSGSGTMNLGGSLTRQMEKDETVSDCSPHIANIGRLVEDMENKIRSTLNEIYFGKTKDIVNGLRSIDAIPDNQKFKQLQRELSQVLTQRQIYIQPDN

SEQ ID NO: 816 - protein, 1086 aa, Homo Sapiens
MACSPDAVVSPSSAFLRSGSVYEPLKSINLPRPDNETLWDKLDHYYRIVKSTLLLYQSPTTGLFPTKTCGGDQKAKIQDSLYCAAGAWALALAYRRIDDDKGRTHELEHSAIKCMRGILYCYMRQADKVQQFKQDPRPTTCLHSVFNVHTGDELLSYEEYGHLQINAVSLYLLYLVEMISSGLQIIYNTDEVSFIQNLVFCVERVYRVPDFGVWERGSKYNNGSTELHSSSVGLAKAALEAINGFNLFGNQGCSWSVIFVDLDAHNRNRQTLCSLLPRESRSHNTDAALLPCISYPAFALDDEVLFSQTLDKVVRKLKGKYGFKRFLRDGYRTSLEDPNRCYYKPAEIKLFDGIECEFPIFFLYMMIDGVFRGNPKQVQEYQDLLTPVLHHTTEGYPVVPKYYYVPADFVEYEKNNPGSQKRFPSNCGRDGKLFLWGQALYIIAKLLADELISPKDIDPVQRYVPLKDQRNVSMRFSNQGPLENDLVVHVALIAESQRLQVFLNTYGIQTQTPQQVEPIQIWPQQELVKAYLQLGINEKLGLSGRPDRPIGCLGTSKIYRILGKTVVCYPIIFDLSDFYMSQDVFLLIDDIKNALQFIKQYWKMHGRPLFLVLIREDNIRGSRFNPILDMLAALKKGIIGGVKVHVDRLQTLISGAVVEQLDFLRISDTEELPEFKSFEELEPPKHSKVKRQSSTPSAPELGQQPDVNISEWKDKPTHEILQKLNDCSCLASQAILLGILLKREGPNFITKEGTVSDHIERVYRRAGSQKLWSVVRRAASLLSKVVDSLAPSITNVLVQGKQVTLGAFGHEEEVISNPLSPRVIQNIIYYKCNTHDEREAVIQQELVIHIGWIISNNPELFSGMLKIRIGWIIHAMEYELQIRGGDKPALDLYQLSPSEVKQLLLDILQPQQNGRCWLNRRQIDGSLNRTPTGFYDRVWQILERTPNGIIVAGKHLPQQPTLSDMTMYEMNFSLLVEDTLGNIDQPQYRQIVVELLMVVSIVLERNPELEFQDKVDLDRLVKEAFNEFQKDQSRLKEIEKQDDMTSFYNTPPLGKRGTCSYLTKAVMNLLLEGEVKPNNDDPCLIS

SEQ ID NO: 817 - protein, 435 aa, Homo Sapiens
MEMEKEFEQIDKSGSWAAIYQDIRHEASDFPCRVAKLPKNKNRNRYRDVSPFDHSRIKLHQEDNDYINASLIKMEEAQRSYILTQGPLPNTCGHFWEMVWEQKSRGVVMLNRVMEKGSLKCAQYWPQKEEKEMIFEDTNLKLTLISEDIKSYYTVRQLELENLTTQETREILHFHYTTWPDFGVPESPASFLNFLFKVRESGSLSPEHGPVVVHCSAGIGRSGTFCLADTCLLLMDKRKDPSSVDIKKVLLEMRKFRMGLIQTADQLRFSYLAVIEGAKFIMGDSSVQDQWKELSHEDLEPPPEHIPPPPRPPKRILEPHNGKCREFFPNHQWVKEETQEDKDCPIKEEKGSPLNAAPYGIESMSQDTEVRSRVVGGSLRGAQAASPAKGEPSLPEKDEDHALSYWKPFLVNMCVATVLTAGAYLCYRFLFNSNT

SEQ ID NO: 818 - protein, 1025 aa, Homo Sapiens
MAPVLSKDSADIESILALNPRTQTHATLCSTSAKKLDKKHWKRNPDKNCFNCEKLENNFDDIKHTTLGERGALREAMRCLKCADAPCQKSCPTNLDIKSFITSIANKNYYGAAKMIFSDNPLGLTCGMVCPTSDLCVGGCNLYATEEGPINIGGLQQFATEVFKAMSIPQIRNPSLPPPEKMSEAYSAKIALFGAGPASISCASFLARLGYSDITIFEKQEYVGGLSTSEIPQFRLPYDVVNFEIELMKDLGVKIICGKSLSVNEMTLSTLKEKGYKAAFIGIGLPEPNKDAIFQGLTQDQGFYTSKDFLPLVAKGSKAGMCACHSPLPSIRGVVIVLGAGDTAFDCATSALRCGARRVFIVFRKGFVNIRAVPEEMELAKEEKCEFLPFLSPRKVIVKGGRIVAMQFVRTEQDETGKWNEDEDQMVHLKADVVISAFGSVLSDPKVKEALSPIKFNRWGLPEVDPETMQTSEAWVFAGGDVVGLANTTVESVNDGKQASWYIHKYVQSQYGASVSAKPELPLFYTPIDLVDISVEMAGLKFINPFGLASATPATSTSMIRRAFEAGWGFALTKTFSLDKDIVTNVSPRIIRGTTSGPMYGPGQSSFLNIELISEKTAAYWCQSVTELKADFPDNIVIASIMCSYNKNDWTELAKKSEDSGADALELNLSCPHGMGERGMGLACGQDPELVRNICRWVRQAVQIPFFAKLTPNVTDIVSIARAAKEGGANGVTATNTVSGLMGLKSDGTPWPAVGIAKRTTYGGVSGTAIRPIALRAVTSIARALPGFPILATGGIDSAESGLQFLHSGASVLQVCSAIQNQDFTVIEDYCTGLKALLYLKSIEELQDWDGQSPATVSHQKGKPVPRIAELMDKKLPSFGPYLEQRKKIIAENKIRLKEQNVAFSPLKRNCFIPKRPIPTIKDVIGKALQYLGTFGELSNVEQVVAMIDEEMCINCGKCYMTCNDSGYQAIQFDPETHLPTITDTCTGCTLCLSVCPIVDCIKMVSRTTPYEPKRGVPLSVNPVC

SEQ ID NO: 819 - protein, 558 aa, Homo Sapiens
MAALTRDPQFQKLQQWYREHRSELNLRRLFDANKDRFNHFSLTLNTNHGHILVDYSKNLVTEDVMRMLVDLAKSRGVEAARERMFNGEKINYTEGRAVLHVALRNRSNTPILVDGKDVMPEVNKVLDKMKSFCQRVRSGDWKGYTGKTITDVINIGIGGSDLGPLMVTEALKPYSSGGPRVWYVSNIDGTHIAKTLAQLNPESSLFIIASKTFTTQETITNAETAKEWFLQAAKDPSAVAKHFVALSTNTTKVKEFGIDPQNMFEFWDWVGGRYSLWSAIGLSIALHVGFDNFEQLLSGAHWMDQHFRTTPLEKNAPVLLALLGIWYINCFGCETHAMLPYDQYLHRFAAYFQQGDMESNGKYITKSGTRVDHQTGPIVWGEPGTNGQHAFYQLIHQGTKMIPCDFLIPVQTQHPIRKGLHHKILLANFLAQTEALMRGKSTEEARKELQAAGKSPEDLERLLPHKVFEGNRPTNSIVFTKLTPFMLGALVAMYEHKIFVQGIIWDINSFDQWGVELGKQLAKKIEPELDGSAQVTSHDASTNGLINFIKQQREARVQ

SEQ ID NO: 820 - protein, 362 aa, Homo Sapiens [sequence omitted]

SEQ ID NO: 821 - protein, 109 aa, Homo Sapiens
EIVMTQSPATLSVSPGERATLSCWASQSISSNLAWYQQKPGQAPRLLIYGASTRATGIPARFSGSGSGTEFTLTISSLQSEDFAIYHCQQYNSWPPLTFGGGTKVEIKR

SEQ ID NO: 822 - protein, 313 aa, Homo Sapiens
MAAPMNGQVCVVTGASRGIGRGIALQLCKAGATVYITGRHLDTLRVVAQEAQSLGGQCVPVVCDSSQESEVRSLFEQVDREQQGRLDVLVNNAYAGVQTILNTRNKAFWETPASMWDDINNVGLRGHYFCSVYGARLMVPAGQGLIVVISSPGSLQYMFNVPYGVGKAACDKLAADCAHELRRHGVSCVSLWPGIVQTELLKEHMAKEEVLQDPVLKQFKSAFSSAETTELSGKCVVALATDPNILSLSGKVLPSCDLARRYGLRDVDGRPVQDYLSLSSVLSHVSGLGWLASYLPSFLRVPKWIIALYTSKF

SEQ ID NO: 823 - protein, 308 aa, Homo Sapiens
MMDVSGVGFPSKVPWKKMSAEELENQYCPSRWVVRLGAEEALRTYSQIGIEATTRARATRKSLLHVPYGDGEGEKVDIYFPDESSEALPFFLFFHGGYWQSGSKDESAFMVHPLTAQGVAVVIVAYGIAPKGTLDHMVDQVTRSVAFVQKRYPSNKGIYLCGHSAGAHLAAMMLLADWTKHGVTPNLRGFFLVSGVFDLEPIVYTSQNVALQLTLEDAQRNSPQLKVAQAQPVDPTCRVLVVVGQFDSPEFHRQSWEFYQVLPVQTLCQGEWKASFEELHDVDHFEIVENLTQKDNVLTQIILKTIFQ

SEQ ID NO: 824 - protein, 547 aa, Homo Sapiens
MYRLMSAVTARAAAPGGLASSCGRRGVHQRAGLPPLGHGWVGGLGLGLGLALGVKLAGGLRGAAPAQSPAAPDPEASPLAEPPQEQSLAPWSPQTPAPPCSRCFARAIESSRDLLHRIKDEVGAPGIVVGVSVDGKEVWSEGLGYADVENRVPCKPETVMRIASISKSLTMVALAKLWEAGKLDLDIPVQHYVPEFPEKEYEGEKVSVTTRLLISHLSGIRHYEKDIKKVKEEKAYKALKMMKENVAFEQEKEGKSNEKNDFTKFKTEQENEAKCRNSKPGKKKNDFEQGELYLREKFENSIESLRLFKNDPLFFKPGSQFLYSTFGYTLLAAIVERASGCKYLDYMQKIFHDLDMLTTVQEENEPVIYNRARFYVYNKKKRLVNTPYVDNSYKWAGGGFLSTVGDLLKFGNAMLYGYQVGLFKNSNENLLPGYLKPETMVMMWTPVPNTEMSWDKEGKYAMAWGVVERKQTYGSCRKQRHYASHTGGAVGASSVLLVLPEELDTETINNKVPPRGIIVSIICNMQSVGLNSTALKIALEFDKDRSD

SEQ ID NO: 825 - protein, 194 aa, Homo Sapiens
MAASLVGKKIVFVTGNAKKLEEVVQILGDKFPCTLVAQKIDLPEYQGEPDEISIQKCQEAVRQVQGPVLVEDTCLCFNALGGLPGPYIKWFLEKLKPEGLHQLLAGFEDKSAYALCTFALSTGDPSQPVRLFRGRTSGRIVAPRGCQDFGWDPCFQPDGYEQTYAEMPKAEKNAVSHRFRALLELQEYFGSLAA

SEQ ID NO: 826 - protein, 122 aa, Homo Sapiens
MTSPEIASLSWGQMKVKGSNTTYKDCKVWPGGSRTWDWRETGTEHSPGVQPADVKEVVEKGVQTLVIGRGMSEALKVPSSTVEYLKKHGIDVRVLQTEQAVKEYNALVAQGVRVGGVFHSTC

SEQ ID NO: 827 - protein, 369 aa, Homo Sapiens
MSVKWTSVILLIQLSFCFSSGNCGKVLVWAAEYSHWMNIKTILDELIQRGHEVTVLASSASILFDPNNSSALKIEIYPTSLTKTELENFIMQQIKRWSDLPKDTFWLYFSQVQEIMSIFGDITRKFCKDVVSNKKFMKKVQESRFDVIFADAIFPCSELLAELFNIPFVYSLSFSPGYTFEKHSGGFIFPPSYVPVVMSELTDQMTFMERVKNMIYVLYFDFWFEIFDMKKWDQFYSEVLGRPTTLSETMGKADVWLIRNSWNFQFPYPLLPNVDFVGGLHCKPAKPLPKEMEDFVQSSGENGVVVFSLGSMVSNMTEERANVIASALAQIPQKVLWRFDGNKPDTLGLNTRLYKWIPQNDLLDIKRML

SEQ ID NO: 828 - protein, 422 aa, Homo Sapiens
MTVFFKTLRNHWKKTTAGLCLLTWGGHWLYGKHCDNLLRRAACQEAQVFGNQLIPPNAQVKKATVFLNPAACKGKARTLFEKNAAPILHLSGMDVTIVKTDYEGQAKKLLELMENTDVIIVAGGDGTLQEVVTGVLRRTDEATFSKIPIGFIPLGETSSLSHTLFAESGNKVQHITDATLAIVKGETVPLDVLQIKGEKEQPVFAMTGLRWGSFRDAGVKVSKYWYLGPLKIKAAHFFSTLKEWPQTHQASISYTGPTERPPNEPEETPVQRPSLYRRILRRLASYWAQPQDALSQEVSPEVWKDVQLSTIELSITTRNNQLDPTSKEDFLNICIEPDTISKGDFITIGSRKVRNPKLHVEGTECLQASQCTLLIPEGAGGSFSIDSEEYEAMPVEVKLLPRKLQFFCDPRKREQMLTSPTQ

SEQ ID NO: 829 - protein, 275 aa, Homo Sapiens [sequence omitted]

SEQ ID NO: 830 - protein, 395 aa, Homo Sapiens
MAWRHLKKRAQDAVIILGGGGLLFASYLMATGDERFYAEHLMPTLQGLLDPESAHRLAVRFTSLGLLPRARFQDSDMLEVRVLGHKFRNPVGIAAGFDKHGEAVDGLYKMGFGFVEIGSVTPKPQEGNPRPRVFRLPEDQAVINRYGFNSHGLSVVEHRLRARQQKQAKLTEDGLPLGVNLGKNKTSVDAAEDYAEGVRVLGPLADYLVVNVSSPNTAGLRSLQGKAELRRLLTKVLQERDGLRRVHRPAVLVKIAPDLTSQDKEDIASVVKELGIDGLIVTNTTVSRPAGLQGALRSETGGLSGKPLRDLSTQTIREMYALTQGRVPIIGVGGVSSGQDALEKIRAGASLVQLYTALTFWGPPVVGKVKRELEALLKEQGFGGVTDAIGADHRR

SEQ ID NO: 831 - protein, 1663 aa, Homo Sapiens
MGPTSGPSLLLLLLTHLPLALGSPMYSIITPNILRLESEETMVLEAHDAQGDVPVTVTVHDFPGKKLVLSSEKTVLTPATNHMGNVTFTIPANREFKSEKGRNKFVTVQATFGTQVVEKVVLVSLQSGYLFIQTDKTIYTPGSTVLYRIFTVNHKLLPVGRTVMVNIENPEGIPVKQDSLSSQNQLGVLPLSWDIPELVNMGQWKIRAYYENSPQQVFSTEFEVKEYVLPSFEVIVEPTEKFYYIYNEKGLEVTITARFLYGKKVEGTAFVIFGIQDGEQRISLPESLKRIPIEDGSGEVVLSRKVLLDGVQNPRAEDLVGKSLYVSATVILHSGSDMVQAERSGIPIVTSPYQIHFTKTPKYFKPGMPFDLMVFVTNPDGSPAYRVPVAVQGEDTVQSLTQGDGVAKLSINTHPSQKPLSITVRTKKQELSEAEQATRTMQALPYSTVGNSNNYLHLSVLRTELRPGETLNVNFLLRMDRAHEAKIRYYTYLIMNKGRLLKAGRQVREPGQDLVVLPLSITTDFIPSFRLVAYYTLIGASGQREVVADSVWVDVKDSCVGSLVVKSGQSEDRQPVPGQQMTLKIEGDHGARVVLVAVDKGVFVLNKKNKLTQSKIWDVVEKADIGCTPGSGKDYAGVFSDAGLTFTSSSGQQTAQRAELQCPQPAARRRRSVQLTEKRMDKVGKYPKELRKCCEDGMRENPMRFSCQRRTRFISLGEACKKVFLDCCNYITELRRQHARASHLGLARSNLDEDIIAEENIVSRSEFPESWLWNVEDLKEPPKNGISTKLMNIFLKDSITTWEILAVSMSDKKGICVADPFEVTVMQDFFIDLRLPYSVVRNEQVEIRAVLYNYRQNQELKVRVELLHNPAFCSLATTKRRHQQTVTIPPKSSLSVPYVIVPLKTGLQEVEVKAAVYHHFISDGVRKSLKVVPEGIRMNKTVAVRTLDPERLGREGVQKEDIPPADLSDQVPDTESETRILLQGTPVAQMTEDAVDAERLKHLIVTPSGCGEQNMIGMTPTVIAVHYLDETEQWEKFGLEKRQGALELIKKGYTQQLAFRQPSSAFAAFVKRAPSTWLTAYVVKVFSLAVNLIAIDSQVLCGAVKWLILEKQKPDGVFQEDAPVIHQEMIGGLRNNNEKDMALTAFVLISLQEAKDICEEQVNSLPGSITKAGDFLEANYMNLQRSYTVAIAGYALAQMGRLKGPLLNKFLTTAKDKNRWEDPGKQLYNVEATSYALLALLQLKDFDFVPPVVRWLNEQRYYGGGYGSTQATFMVFQALAQYQKDAPDHQELNLDVSLQLPSRSSKITHRIHWESASLLRSEETKENEGFTVTAEGKGQGTLSVVTMYHAKAKDQLTCNKFDLKVTIKPAPETEKRPQDAKNTMILEICTRYRGDQDATMSILDISMMTGFAPDTDDLKQLANGVDRYISKYELDKAFSDRNTLIIYLDKVSHSEDDCLAFKVHQYFNVELIQPGAVKVYAYYNLEESCTRFYHPEKEDGKLNKLCRDELCRCAEENCFIQKSDDKVTLEERLDKACEPGVDYVYKTRLVKVQLSNDFDEYIMAIEQTIKSGSDEVQVGQQRTFISPIKCREALKLEEKKHYLMWGLSSDFWGEKPNLSYIIGKDTWVEHWPEEDECQDEENQKQCQDLGAFTESMVVFGCPN

SEQ ID NO: 832 - protein, 467 aa, Homo Sapiens
MWRCPLGLLLLLPLAGHLALGAQQGRGRRELAPGLHLRGIRDAGGRYCQEQDLCCRGRADDCALPYLGAICYCDLFCNRTVSDCCPDFWDFCLGVPPPFPPIQGCMHGGRIYPVLGTYWDNCNRCTCQENRQWQCDQEPCLVDPDMIKAINQGNYGWQAGNHSAFWGMTLDEGIRYRLGTIRPSSSVMNMHEIYTVLNPGEVLPTAFEASEKWPNLIHEPLDQGNCAGSWAFSTAAVASDRVSIHSLGHMTPVLSPQNLLSCDTHQQQGCRGGRLDGAWWFLRRRGVVSDHCYPFSGRERDEAGPAPPCMMHSRAMGRGKRQATAHCPNSYVNNNDIYQVTPVYRLGSNDKEIMKELMENGPVQALMEVHEDFFLYKGGIYSHTPVSLGRPERYRRHGTHSVKITGWGEETLPDGRTLKYWTAANSWGPAWGERGHFRIVRGVNECDIESFVLGVWGRVGMEDMGHH

SEQ ID NO: 833 - protein, 203 aa, Homo Sapiens [sequence omitted]

SEQ ID NO: 834 - protein, 2602 aa, Homo Sapiens
MPVTEKDLAEDAPWKKIQQNTFTRWCNEHLKCVNKRIGNLQTDLSDGLRLIALLEVLSQKRMYRKYHQRPTFRQMQLENVSVALEFLDRESIKLVSIDSKAIVDGNLKLILGLVWTLILHYSISMPVWEDEGDDDAKKQTPKQRLLGWIQNKIPYLPITNFNQNWQDGKALGALVDSCAPGLCPDWESWDPQKPVDNAREAMQQADDWLGVPQVITPEEIIHPDVDEHSVMTYLSQFPKAKLKPGAPLKPKLNPKKARAYGRGIEPTGNMVKQPAKFTVDTISAGQGDVMVFVEDPEGNKEEAQVTPDSDKNKTYSVEYLPKVTGLHKVTVLFAGQHISKSPFEVSVDKAQGDASKVTAKGPGLEAVGNIANKPTYFDIYTAGAGVGDIGVEVEDPQGKNTVELLVEDKGNQVYRCVYKPMQPGPHVVKIFFAGDTIPKSPFVVQVGEACNPNACRASGRGLQPKGVRIRETTDFKVDTKAAGSGELGVTMKGPKGLEELVKQKDFLDGVYAFEYYPSTPGRYSIAITWGGHHIPKSPFEVQVGPEAGMQKVRAWGPGLHGGIVGRSADFVVESIGSEVGSLGFAIEGPSQAKIEYNDQNDGSCDVKYWPKEPGEYAVHIMCDDEDIKDSPYMAFIHPATGGYNPDLVRAYGPGLEKSGCIVNNLAEFTVDPKDAGKAPLKIFAQDGEGQRIDIQMKNRMDGTYACSYTPVKAIKHTIAVVWGGVNIPHSPYRVNIGQGSHPQKVKVFGPGVERSGLKANEPTHFTVDCTEAGEGDVSVGIKCDARVLSEDEEDVDFDIIHNANDTFTVKYVPPAAGRYTIKVLFASQEIPASPFRVKVDPSHDASKVKAEGPGLSKAGVENGKPTHFTVYTKGAGKAPLNVQFNSPLPGDAVKDLDIIDNYDYSHTVKYTPTQQGNMQVLVTYGGDPIPKSPFTVGVAAPLDLSKIKLNGLENRVEVGKDQEFTVDTRGAGGQGKLDVTILSPSRKVVPCLVTPVTGRENSTAKFIPREEGLYAVDVTYDGHPVPGSPYTVEASLPPDPSKVKAHGPGLEGGLVGKPAEFTIDTKGAGTGGLGLTVEGPCEAKIECSDNGDGTCSVSYLPTKPGEYFVNILFEEVHIPGSPFKADIEMPFDPSKVVASGPGLEHGKVGEAGLLSVDCSEAGPGALGLEAVSDSGTKAEVSIQNNKDGTYAVTYVPLTAGMYTLTMKYGGELVPHFPARVKVEPAVDTSRIKVFGPGIEGKDVFREATTDFTVDSRPLTQVGGDHIKAHIANPSGASTECFVTDNADGTYQVEYTPFEKGLHVVEVTYDDVPIPNSPFKVAVTEGCQPSRVQAQGPGLKEAFTNKPNVFTVVTRGAGIGGLGITVEGPSESKINCRDNKDGSCSAEYIPFAPGDYDVNITYGGAHIPGSPFRVPVKDVVDPSKVKIAGPGLGSGVRARVLQSFTVDSSKAGLAPLEVRVLGPRGLVEPVNVVDNGDGTHTVTYTPSQEGPYMVSVKYADEEIPRSPFKVKVLPTYDASKVTASGPGLSSYGVPASLPVDFAIDARDAGEGLLAVQITDQEGKPKRAIVHDNKDGTYAVTYIPDKTGRYMIGVTYGGDDIPLSPYRIRATQTGDASKCLATGPGIASTVKTGEEVGFVVDAKTAGKGKVTCTVLTPDGTEAEADVIENEDGTYDIFYTAAKPGTYVIYVRFGGVDIPNSPFTVMATDGEVTAVEEAPVNACPPGFRPWVTEEAYVPVSDMNGLGFKPFDLVIPFAVRKGEITGEVHMPSGKTATPEIVDNKDGTVTVRYAPTEVGLHEMHIKYMGSHIPESPLQFYVNYPNSGSVSAYGPGLVYGVANKTATFTIVTEDAGEGGLDLAIEGPSKAEISCIDNKDGTCTVTYLPTLPGDYSILVKYNDKHIPGSPFTAKITDDSRRCSQVKLGSAADFLLDISETDLSSLTASIKAPSGRDEPCLLKRLPNNHIGISFIPREVGEHLVSIKKNGNHVANSPVSIMVVQSEIGDARRAKVYGRGLSEGRTFEMSDFIVDTRDAGYGGISLAVEGPSKVDIQTEDLEDGTCKVSYFPTVPGVYIVSTKFADEHVPGSPFTVKISGEGRVKESITRTSRAPSVATVGSICDLNLKIPEINSSDMSAHVTSPSGRVTEAEIVPMGKNSHCVRFVPQEMGVHTVSVKYRGQHVTGSPFQFTVGPLGEGGAHKVRAGGPGLERGEAGVPAEFSIWTREAGAGGLSIAVEGPSKAEITFDDHKNGSCGVSYIAQEPGNYEVSIKFNDEHIPESPYLVPVIAPSDDARRLTVMSLQESGLKVNQPASFAIRLNGAKGKIDAKVHSPSGAVEECHVSELEPDKYAVRFIPHENGVHTIDVKFNGSHVVGSPFKVRVGEPGQAGNPALVSAYGTGLEGGTTGIQSEFFINTTRAGPGTLSVTIEGPSKVKMDCQETPEGYKVMYTPMAPGNYLISVKYGGPNHIVGSPFKAKVTGQRLVSPGSANETSSILVESVTRSSTETCYSAIPKASSDASKVTSKGAGLSKAFVGQKSSFLVDCSKAGSNMLLIGVHGPTTPCEEVSMKHVGNQQYNVTYVVKERGDYVLAVKWGEEHIPGSPFHVTVP

SEQ ID NO: 835 - protein, 710 aa, Homo Sapiens
MEALIPVINKLQDVFNTVGADIIQLPQIVVVGTQSSGKSSVLESLVGRDLLPRGTGIVTRRPLILQLVHVSQEDKRKTTGEENGVEAEEWGKFLHTKNKLYTDFDEIRQEIENETERISGNNKGVSPEPIHLKIFSPNVVNLTLVDLPGMTKVPVGDQPKDIELQIRELILRFISNPNSIILAVTAANTDMATSEALKISREVDPDGRRTLAVITKLDLMDAGTDAMDVLMGRVIPVKLGIIGVVNRSQLDINNKKSVTDSIRDEYAFLQKKYPSLANRNGTKYLARTLNRLLMHHIRDCLPELKTRINVLAAQYQSLLNSYGEPVDDKSATLLQLITKFATEYCNTIEGTAKYIETSELCGGARICYIFHETFGRTLESVDPLGGLNTIDILTAIRNATGPRPALFVPEVSFELLVKRQIKRLEEPSLRCVELVHEEMQRIIQHCSNYSTQELLRFPKLHDAIVEVVTCLLRKRLPVTNEMVHNLVAIELAYINTKHPDFADACGLMNNNIEEQRRNRLARELPSAVSRDKSSKVPSALAPAVASGGGGVGDGVQEPTTGNWRGMLKTSKAEELLAEEKSKPIPIMPASPQKGHAVNLLDVPVPVARKLSAREQRDCEVIERLIKSYFLIVRKNIQDSVPKAVMHFLVNHVKDTLQSELVGQLYKSSLLDDLLTESEDMAQRRKEAADMLKALQGASQIIAEIRETHLW

SEQ ID NO: 836 - protein, 118 aa, Homo Sapiens
MCDKEFMWALKNGDLDEVKDYVAKGEDVNRTLEGGRKPLHYAADCGQLEILEFLLLKGADINAPDKHHITPLLSAVYEGHVSCVKLLLSKGADKTVKGPDGLTAFEATDNQAIKALLQ

SEQ ID NO: 837 - protein, 248 aa, Homo Sapiens
MAGITTIEAVKRKIQVLQQQADDAEERAERLQREVEGERRAREQAEAEVASLNRRIQLVEEELDRAQERLATALQKLEEAEKAADESERGMKVIENRALKDEEKMELQEIQLKEAKHIAEEADRKYEEVARKLVIIEGDLERTEERAELAESRCREMDEQIRLMDQNLKCLSAAEEKYSQKEDKYEEEIKILTDKLKEAETRAEFAERSVAKLEKTIDDLEDKLKCTKEEHLCTQRMLDQTLLDLNEM

SEQ ID NO: 838 - protein, 130 aa, Homo Sapiens
MAEYGTLLQDLTNNITLEDLEQLKSACKEDIPSEKSEEITTGSAWFSFLESHNKLDKDNLSYIEHIFEISRRPDLLTMVVDYRTRVLKISEEDELDTKLTRIPSAKKYKDIIRQPSEEEIIKLAPPPKKA

SEQ ID NO: 839 - protein, 194 aa, Homo Sapiens [sequence omitted]

SEQ ID NO: 840 - protein, 1821 aa, Homo Sapiens
MRPRTKARSPGRALRNPWRGFLPLTLALFVGAGHAQRDPVGRYEPAGGDANRLRRPGGSYPAAAAAKVYSLFREQDAPVAGLQPVERAQPGWGSPRRPTEAEARRPSRAQQSRRVQPPAQTRRSTPLGQQQPAPRTRAAPALPRLGTPQRSGAAPPTPPRGRLTGRNVCGGQCCPGWTTANSTNHCIKPVCEPPCQNRGSCSRPQLCVCRSGFRGARCEEVIPDEEFDPQNSRLAPRRWAERSPNLRRSSAAGEGTLARAQPPAPQSPPAPQSPPAGTLSGLSQTHPSQQHVGLSRTVRLHPTATASSQLSSNALPPGPGLEQRDGTQQAVPLEHPSSPWGLNLTEKIKKIKIVFTPTICKQTCARGHCANSCERGDTTTLYSQGGHGHDPKSGFRIYFCQIPCLNGGRCIGRDECWCPANSTGKFCHLPIPQPDREPPGRGSRPRALLEAPLKQSTFTLPLSNQLASVNPSLVKVHIHHPPEASVQIHQVAQVRGGVEEALVENSVETRPPPWLPASPGHSLWDSNNIPARSGEPPRPLPPAAPRPRGLLGRCYLNTVNGQCANPLLELTTQEDCCGSVGAFWGVTLCAPCPPRPASPVIENGQLECPQGYKRLNLTHCQDINECLTLGLCKDAECVNTRGSYLCTCRPGLMLDPSRSRCVSDKAISMLQGLCYRSLGPGTCTLPLAQRITKQICCCSRVGKAWGSECEKCPLPGTEAFREICPAGHGYTYASSDIRLSMRKAEEEELARPPREQGQRSSGALPGPAERQPLRVVTDTWLEAGTIPDKGDSQAGQVTTSVTHAPAWVTGNATTPPMPEQGIAEIQEEQVTPSTDVLVTLSTPGIDRCAAGATNVCGPGTCVNLPDGYRCVCSPGYQLHPSQAYCTDDNECLRDPCKGKGRCINRVGSYSCFCYPGYTLATSGATQECQDINECEQPGVCSGGQCTNTEGSYHCECDQGYIMVRKGHCQDINECRHPGTCPDGRCVNSPGSYTCLACEEGYRGQSGSCVDVNECLTPGVCAHGKCTNLEGSFRCSCEQGYEVTSDEKGCQDVDECASRASCPTGLCLNTEGSFACSACENGYWVNEDGTACEDLDECAFPGVCPSGVCTNTAGSFSCKDCDGGYRPSPLGDSCEDVDECEDPQSSCLGGECKNTVGSYQCLCPQGFQLANGTVCEDVNECMGEEHCAPHGECLNSHGSFFCLCAPGFVSAEGGTSCQDVDECATTDPCVGGHCVNTEGSFNCLCETGFQPSPESGECVDIDECEDYGDPVCGTWKCENSPGSYRCVLGCQPGFHMAPNGDCIDIDECANDTMCGSHGFCDNTDGSFRCLCDQGFEISPSGWDCVDVNECELMLAVCGAALCENVEGSFLCLCASDLEEYDAQEGHCRPRGAGGQSMSEAPTGDHAPAPTRMDCYSGQKGHAPCSSVLGRNTTQAECCCTQGASWGDACDLCPSEDSAEFSEICPSGKGYIPVEGAWTFGQTMYTDADECVIFGPGLCPNGRCLNTVPGYVCLCNPGFHYDASHKKCEDHDECQDLACENGECVNTEGSFHCFCSPPLTLDLSQQRCMNSTSSTEDLPDHDIHMDICWKKVTNDVCSEPLRGHRTTYTECCCQDGEAWSQQCALCPPRSSEVYAQLCNVARIEAEREAGVHFRPGYEYGPGPDDLHYSIYGPDGAPFYNYLGPEDTVPEPAFPNTAGHSADRTPILESPLQPSELQPHYVASHPEPPAGFEGLQAEECGILNGCENGRCVRVREGYTCDCFEGFQLDAAHMACVDVNECDDLNGPAVLCVHGYCENTEGSYRCHCSPGYVAEAGPPHCTAKE

SEQ ID NO: 841 - protein, 765 aa, Homo Sapiens
MTTYLEFIQQNEERDGVRFSWNVWPSSRLEATRMVVPVAALFTPLKERPDLPPIQYEPVLCSRTTCRAVLNPLCQVDYRAKLWACNFCYQRNQFPPSYAGISELNQPAELLPQFSSIEYVVLRGPQMPLIFLYVVDTCMEDEDLQALKESMQMSLSLLPPTALVGLITFGRMVQVHELGCEGISKSYVFRGTKDLSAKQLQEMLGLSKVPLTQATRGPQVQQPPPSNRFLQPVQKIDMNLTDLLGELQRDPWPVPQGKRPLRSSGVALSIAVGLLECTFPNTGARIMMFIGGPATQGPGMVVGDELKTPIRSWHDIDKDNAKYVKKGTKHFEALANRAATTGHVIDIYACALDQTGLLEMKCCPNLTGGYMVMGDSFNTSLFKQTFQRVFTKDMHGQFKMGFGGTLEIKTSREIKISGAIGPCVSLNSKGPCVSENEIGTGGTCQWKICGLSPTTTLAIYFEVVNQHNAPIPQGGRGAIQFVTQYQHSSGQRRIRVTTIARNWADAQTQIQNIAASFDQEAAAILMARLAIYRAETEEGPDVLRWLDRQLIRLCQKFGEYHKDDPSSFRFSETFSLYPQFMFHLRRSSFLQVFNNSPDESSYYRHHFMRQDLTQSLIMIQPILYAYSFSGPPEPVLLDSSSILADRILLMDTFFQILIYHGETIAQWRKSGYQDMPEYENFRHLLQAPVDDAQEILHSRFPMPRYIDTEHGGSQARFLLSKVNPSQTHNNMYAWGQESGAPILTDDVSLQVFMDHLKKLAVSSAA

SEQ ID NO: 842 - protein, 201 aa, Homo Sapiens
MKWVWALLLLAALGSGRAERDCRVSSFRVKENFDKARFSGTWYAMAKKDPEGLFLQDNIVAEFSVDETGQMSATAKGRVRLLNNWDVCADMVGTFTDTEDPAKFKMKYWGVASFLQKGNDDHWIVDTDYDTYAVQYSCRLLNLDGTCADSYSFVFSRDPNGLPPEAQKIVRQRQEELCLARQYRLIVHNGYCDGRSERNLL

SEQ ID NO: 843 - protein, 999 aa, Homo Sapiens
MADKVRRQRPRRRVCWALVAVLLADLLALSDTLAVMSVDLGSESMKVAIVKPGVPMEIVLNKESRRKTPVIVTLKENERFFGDSAASMAIKNPKATLRYFQHLLGKQADNPHVALYQARFPEHELTFDPQRQTVHFQISSQLQFSPEEVLGMVLNYSRSLAEDFAEQPIKDAVITVPVFFNQAERRAVLQAARMAGLKVLQLINDNTATALSYGVFRRKDINTTAQNIMFYDMGSGSTVCTIVTYQMVKTKEAGMQPQLQIRGVGFDRTLGGLEMELRLRERLAGLFNEQRKGQRAKDVRENPRAMAKLLREANRLKTVLSANADHMAQIEGLMDDVDFKAKVTRVEFEELCADLFERVPGPVQQALQSAEMSLDEIEQVILVGGATRVPRVQEVLLKAVGKEELGKNINADEAAAMGAVYQAAALSKAFKVKPFVVRDAVVYPILVEFTREVEEEPGIHSLKHNKRVLFSRMGPYPQRKVITFNRYSHDFNFHINYGDLGFLGPEDLRVFGSQNLTTVKLKGVGDSFKKYPDYESKGIKAHFNLDESGVLSLDRVESVFETLVEDSAEEESTLTKLGNTISSLFGGGTTPDAKENGTDTVQEEEESPAEGSKDEPGEQVELKEEAEAPVEDGSQPPPPEPKGDATPEGEKATEKENGDKSEAQKPSEKAEAGPEGVAPAPEGEKKQKPARKRRMVEEIGVELVVLDLPDLPEDKLAQSVQKLQDLTLRDLEKQEREKAANSLEAFIFETQDKLYQPEYQEVSTEEQREEISGKLSAASTWLEDEGVGATTVMLKEKLAELRKLCQGLFFRVEERKKWPERLSALDNLLNHSSMFLKGARLIPEMDQIFTEVEMTTLEKVINETWAWKNATLAEQAKLPATEKPVLLSKDIEAKMMALDREVQYLLNKAKFTKPRPRPKDKNGTRAEPPLNASASDQGEKVIPPAGQTEDAEPISEPEKVETGSEPGDTEPLELGGPGAEPEQKEQSTGQKRPLKNDEL

SEQ ID NO: 844 - protein, 438 aa, Homo Sapiens
MALRGVSVRLLSRGPGLHVLRTWVSSAAQTEKGGRTQSQLAKSSRPEFDWQDPLVLEEQLTTDEILIRDTFRTYCQERLMPRILLANRNEVFHREIISEMGELGVLGPTIKGYGCAGVSSVAYGLLARELERVDSGYRSAMSVQSSLVMHPIYAYGSEEQRQKYLPQLAKGELLGCFGLTEPNSGSDPSSMETRAHYNSSNKSYTLNGTKTWITNSPMADLFVVWARCEDGCIRGFLLEKGMRGLSAPRIQGKFSLRASATGMIIMDGVEVPEENVLPGASSLGGPFGCLNNARYGIAWGVLGASEFCLHTARQYALDRMQFGVPLARNQLIQKKLADMLTEITLGLHACLQLGRLKDQDKAAPEMVSLLKRNNCGKALDIARQARDMLGGNGISDEYHVIRHAMNLEAVNTYEGTHDIHALILGRAITGIQAFTASK

SEQ ID NO: 845 - protein, 1086 aa, Homo Sapiens
MANLLKTVVTGCSCPLLSNLGSCKGLRVKKDFLRTFYTHQELWCKAPVKPGIPYKQLTVGVPKEIFQNEKRVALSPAGVQNLVKQGFNVVVESGAGEASKFSDDHYRVAGAQIQGAKEVLASDLVVKVRAPMVNPTLGVHEADLLKTSGTLISFIYPAQNPELLNKLSQRKTTVLAMDQVPRVTIAQGYDALSSMANIAGYKAVVLAANHFGRFFTGQITAAGKVPPAKILIVGGGVAGLASAGAAKSMGAIVRGFDTRAAALEQFKSLGAEPLEVDLKESGEGQGGYAKEMSKEFIEAEMKLFAQQCKEVDILISTALIPGKKAPVLFNKEMIESMKEGSVVVDLAAEAGGNFETTKPGELYIHKGITHIGYTDLPSRMATQASTLYSNNITKLLKAISPDKDNFYFDVKDDFDFGTMGHVIRGTVVMKDGKVIFPAPTPKNIPQGAPVKQKTVAELEAEKAATITPFRKTMSTASAYTAGLTGILGLGIAAPNLAFSQMVTTFGLAGIVGYHTVWGVTPALHSPLMSVTNAISGLTAVGGLALMGGHLYPSTTSQGLAALAAFISSVNIAGGFLVTQRMLDMFKRPTDPPEYNYLYLLPAGTFVGGYLAALYSGYNIEQIMYLGSGLCCVGALAGLSTQGTARLGNALGMIGVAGGLAATLGVLKPGPELLAQMSGAMALGGTIGLTIAKRIQISDLPQLVAAFHSLVGLAAVLTCIAEYIIEYPHFATDAAANLTKIVAYLGTYIGGVTFSGSLIAYGKLQGLLKSAPLLLPGRHLLNAGLLAASVGGIIPFMVDPSFTTGITCLGSVSALSAVMGVTLTAAIGGADMPVVITVLNSYSGWALCAEGFLLNNNLLTIVGALIGSSGAILSYIMCVAMNRSLANVILGGYGTTSTAGGKPMEISGTHTEINLDNAIDMIREANSIIITPGYGLCAAKAQYPIADLVKMLTEQGKKVRFGIHPVAGRMPGQLNVLLAEAGVPYDIVLEMDEINHDFPDTDLVLVIGANDTVNSAAQEDPNSIIAGMPVLEVWKSKQVIVMKRSLGVGYAAVDNPIFYKPNTAMLLGDAKKTCDALQAKVRESYQK

SEQ ID NO: 846 - protein, 522 aa, Homo Sapiens
MNINDLKLTLSKAGQEHLLRFWNELEEAQQVELYAELQAMNFEELNFFFQKAIEGFNQSSHQKNVDARMEPVPREVLGSATRDQDQLQAWESEGLFQISQNKVAVLLLAGGQGTRLGVAYPKGMYDVGLPSRKTLFQIQAERILKLQQVAEKYYGNKCIIPWYIMTSGRTMESTKEFFTKHKYFGLKKENVIFFQQGMLPAMSFDGKIILEEKNKVSMAPDGNGGLYRALAAQNIVEDMEQRGIWSIHVYCVDNILVKVADPRFIGFCIQKGADCGAKVVEKTNPTEPVGVVCRVDGVYQVVEYSEISLATAQKRSSDGRLLFNAGNIANHFFTVPFLRDVVNVYEPQLQHHVAQKKIPYVDTQGQLIKPDKPNGIKMEKFVFDIFQFAKKFVVYEVLREDEFSPLKNADSQNGKDNPTTARHALMSLHHCWVLNAGGHFIDENGSRLPAIPRSATNGKSETITADVNHNLKDANDVPIQCEISPLISYAGEGLESYVADKEFHAPLIIDENGVHELVKNGI

SEQ ID NO: 847 - protein, 1403 aa, Homo Sapiens
MSGARTASTPTPPQTGGGLEPQANGETPQVAVIVRPDDRSQGAIIADRPGLPGPEHSPSESQPSSPSPTPSPSPVLEPGSEPNLAVLSIPGDTMTTIQMSVEESTPISRETGEPYRLSPEPTPLAEPILEVEVTLSKPVPESEFSSSPLQAPTPLASHTVEIHEPNGMVPSEDLEPEVESSPELAPPPACPSESPVPIAPTAQPEELLNGAPSPPAVDLSPVSEPEEQAKEVTASMAPPTIPSATPATAPSATSPAQEEEMEEEEEEEEGEAGEAGEAESEKGGEELLPPESTPIPANLSQNLEAAAATQVAVSVPKRRRKIKELNKKEAVGDLLDAFKEANPAVPEVENQPPAGSNPGPESEGSGVPPRPEEADETWDSKEDKIHNAENIQPGEQKYEYKSDQWKPLNLEEKKRYDREFLLGFQFIFASMQKPEGLPHISDVVLDKANKTPLRPLDPTRLQGINCGPDFTPSFANLGRTTLSTRGPPRGGPGGELPRGPAGLGPRRSQQGPRKEPRKIIATVLMTEDIKLNKAEKAWKPSSKRTAADKDRGEEDADGSKTQDLFRRVRSILNKLTPQMFQQLMKQVTQLAIDTEERLKGVIDLIFEKAISEPNFSVAYANMCRCLMALKVPTTEKPTVTVNFRKLLLNRCQKEFEKDKDDDEVFEKKQKEMDEAATAEERGRLKEELEEARDIARRRSLGNIKFIGELFKLKMLTEAIMHDCVVKLLKNHDEESLECLCRLLTTIGKDLDFEKAKPRMDQYFNQMEKIIKEKKTSSRIRFMLQDVLDLRGSNWVPRRGDQGPKTIDQIHKEAEMEEHREHIKVQQLMAKGSDKRRGGPPGPPISRGLPLVDDGGWNTVPISKGSRPIDTSRLTKITKPGSIDSNNQLFAPGGRLSWGKGSSGGSGAKPSDAASEAARPATSTLNRFSALQQAVPTESTDNRRVVQRSSLSRERGEKAGDRGDRLERSERGGDRGDRLDRARTPATKRSFSKEVEERSRERPSQPEGLRKAASLTEDRDRGRDAVKREAALPPVSPLKAALSEEELEKKSKAIIEEYLHLNDMKEAVQCVQELASPSLLFIFVRHGVESTLERSAIAREHMGQLLHQLLCAGHLSTAQYYQGLYEILELAEDMEIDIPHVWLYLAELVTPILQEGGVPMGELFREITKPLRPLGKAASLLLEILGLLCKSMGPKKVGTLWREAGLSWKEFLPEGQDIGAFVAEQKVEYTLGEESEAPGQRALPSEELNRQLEKLLKEGSSNQRVFDWIEANLSEQQIVSNTLVRALMTAVCYSAIIFETPLRVDVAVLKARAKLLQKYLCDEQKELQALYALQALVVTLEQPPNLLRMFFDALYDEDVVKEDAFYSWESSKDPAEQQGKGVALKSVTAFFKWLREAEEESDHN

SEQ ID NO: 848 - protein, 382 aa, Homo Sapiens
MTEFWLISAPGEKTCQQTWEKLHAATSKNNNLAVTSKFNIPDLKVGTLDVLVGLSDELAKLDAFVEGVVKKVAQYMADVLEDSKDKVQENLLANGVDLVTYITRFQWDMAKYPIKQSLKNISEIIAKGVTQIDNDLKSRASAYNNLKGNLQNLERKNAGSLLTRSLAEIVKKDDFVLDSEYLVTLLVVVPKLNHNDWIKQYETLAEMVVPRSSNVLSEDQDSYLCNVTLFRKAVDDFRHKARENKFIVRDFQYNEEEMKADKEEMNRLSTDKKKQFGPLVRWLKVNFSEAFIAWIHVKALRVFVESVLRYGLPVNFQAMLLQPNKKTLKKLREVLHELYKHLDSSAAAIIDAPMDIPGLNLSQQEYYPYVYYKIDCNLLEFK

SEQ ID NO: 849 - protein, 1249 aa, Homo Sapiens
MATAATEEPFPFHGLLPKKETGAASFLCRYPEYDGRGVLIAVLDTGVDPGAPGMQVTTDGKPKIVDIIDTTGSGDVNTATEVEPKDGEIVGLSGRVLKIPASWTNPSGKYHIGIKNGYDFYPKALKERIQKERKEKIWDPVHRVALAEACRKQEEFDVANNGSSQANKLIKEELQSQVELLNSFEKKYSDPGPVYDCLVWHDGEVWRACIDSNEDGDLSKSTVLRNYKEAQEYGSFGTAEMLNYSVNIYDDGNLLSIVTSGGAHGTHVASIAAGHFPEEPERNGVAPGAQILSIKIGDTRLSTMETGTGLIRAMIEVINHKCDLVNYSYGEATHWPNSGRICEVINEAVWKHNIIYVSSAGNNGPCLSTVGCPGGTTSSVIGVGAYVSPDMMVAEYSLREKLPANQYTWSSRGPSADGALGVSISAPGGAIASVPNWTLRGTQLMNGTSMSSPNACGGIALILSGLKANNIDYTVHSVRRALENTAVKADNIEVFAQGHGIIQVDKAYDYLVQNTSFANKLGFTVTVGNNRGIYLRDPVQVAAPSDHGVGIEPVFPENTENSEKISLQLHLALTSNSSWVQCPSHLELMNQCRHINIRVDPRGLREGLHYTEVCGYDIASPNAGPLFRVPITAVIAAKVNESSHYDLAFTDVHFKPGQIRRHFIEVPEGATWAEVTVCSCSSEVSAKFVLHAVQLVKQRAYRSHEFYKFCSLPEKGTLTEAFPVLGGKAIEFCIARWWASLSDVNIDYTISFHGIVCTAPQLNIHASEGINRFDVQSSLKYEDLAPCITLKNWVQTLRPVSAKTKPLGSRDVLPNNRQLYEMVLTYNFHQPKSGEVTPSCPLLCELLYESEFDSQLWIIFDQNKRQMGSGDAYPHQYSLKLEKGDYTIRLQIRHEQISDLERLKDLPFIVSHRLSNTLSLDIHENHSFALLGKKKSSNLTLPPKYNQPFFVTSLPDDKIPKGAGPGCYLAGSLTLSKTELGKKADVIPVHYYLIPPPTKTKNGSKDKEKDSEKEKDLKEEFTEALRDLKIQWMTKLDSSDIYNELKETYPNYLPLYVARLHQLDAEKERMKRLNEIVDAANAVISHIDQTALAVYIAMKTDPRPDAATIKNDMDKQKSTLVDALCRKGCALADHLLHTQAQDGAISTDAEGKEEEGESPLDSLAETFWETTKWTDLFDNKVLTFAYKHALVNKMYGRGLKFATKLVEEKPTKENWKNCIQLMKLLGWTHCASFTENWLPIMYPPDYCVF

SEQ ID NO: 850 - protein, 926 aa, Homo Sapiens
MLQVHRTGLGRLGVSLSKGLHHKAVLAVRREDVNAWERRAPLAPKHIKGITNLGYKVLIQPSNRRAIHDKDYVKAGGILQEDISEACLILGVKRPPEEKLMSRKTYAFFSHTIKAQEANMGLLDEILKQEIRLIDYEKMVDHRGVRVVAFGQWAGVAGMINILHGMGLRLLALGHHTPFMHIGMAHNYRNSSQAVQAVRDAGYEISLGLMPKSIGPLTFVFTGTGNVSKGAQAIFNELPCEYVEPHELKEVSQTGDLRKVYGTVLSRHHHLVRKTDAVYDPAEYDKHPERYISRFNTDIAPYTTCLINGIYWEQNTPRLLTRQDAQSLLAPGKFSPAGVEGCPALPHKLVAICDISADTGGSIEFMTECTTIEHPFCMYDADQHIIHDSVEGSGILMCSIDNLPAQLPIEATECFGDMLYPYVEEMILSDATQPLESQNFSPVVRDAVITSNGTLPDKYKYIQTLRESRERAQSLSMGTRRKVLVLGSGYISEPVLEYLSRDGNIEITVGSDMKNQIEQLGKKYNINPVSMDICKQEEKLGFLVAKQDLVISLLPYVLHPLVAKACITNKVNMVTASYITPALKELEKSVEDAGITIIGELGLDPGLDHMLAMETIDKAKEVGATIESYISYCGGLPAPEHSNNPLRYKFSWSPVGVLMNVMQSATYLLDGKVVNVAGGISFLDAVTSMDFFPGLNLEGYPNRDSTKYAEIYGISSAHTLLRGTLRYKGYMKALNGFVKLGLINREALPAFRPEANPLTWKQLLCDLVGISPSSEHDVLKEAVLKKLGGDNTQLEAAEWLGLLGDEQVPQAESILDALSKHLVMKLSYGPEEKDMIVMRDSFGIRHPSGHLEHKTIDLVAYGDINGFSAMAKTVGLPTAMAAKMLLDGEIGAKGLMGPFSKEIYGPILERIKAEGIIYTTQSTIKP

SEQ ID NO: 851 - protein, 684 aa, Homo Sapiens
MASGRRGWDSSHEDDLPVYLARPGTTDQVPRQKYGGMFCNVEGAFESKTLDFDALSVGQRGAKTPRSGQGSDRGSGSRPGIEGDTPRRGQGREESREPAPASPAPAGVEIRSATGKEVLQNLGPKDKSDRLLIKGGRIVNDDQSFYADIYMEDGLIKQIGDNLIVPGGVKTIEANGKMVIPGGIDVHTHFQMPYKGMTTVDDFFQGTKAALAGGTTMIIDHVVPEPESSLTEAYEKWREWADGKSCCDYALHVDITHWNDSVKQEVQNLIKDKGVNSFMVYMAYKDLYQVSNTELYEIFTCLGELGAIAQVHAENGDIIAQEQTRMLEMGITGPEGHVLSRPEELEAEAVFRAITIASQTNCPLYVTKVMSKSAADLISQARKKGNVVFGEPITASLGIDGTHYWSKNWAKAAAFVTSPPLSPDPTTPDYINSLLASGDLQLSGSAHCTFSTAQKAIGKDNFTAIPEGTNGVEERMSVIWDKAVATGKMDENQFVAVTSTNAAKIFNLYPRKGRISVGSDSDLVIWDPDAVKIVSAKNHQSAAEYNIFEGMELRGAPLVVICQGKIMLEDGNLHVTQGAGRFIPCSPFSDYVYKRIKARRKMADLHAVPRGMYDGPVFDLTTTPKGGTPAGSARGSPTRPNPPVRNLHQSGFSLSGTQVDEGVRSASKRIVAPPGGRSNITSLS

SEQ ID NO: 852 - protein, 399 aa, Homo Sapiens
ASTKGPSVFPLAPSSKSTSGGTAALGCLVKDYFPEPVTVSWNSGALTSGVHTFPAVLQSSGLYSLSSVVTVPSSSLGTQTYICNVNHKPSNTKVDKKVEPKSCDKTHTCPPCPAPELLGGPSVFLFPPKPKDTLMISRTPEVTCVVVDVSHEDPEVKFNWYVDGVEVHNAKTKPREEQYNSTYRVVSVLTVLHQDWLNGKEYKCKVSNKALPAPIEKTISKAKGQPREPQVYTLPPSRDELTKNQVSLTCLVKGFYPSDIAVEWESNGQPENNYKTTPPVLDSDGSFFLYSKLTVDKSRWQQGNVFSCSVMHEALHNHYTQKSLSLSPELQLEESCAEAQDGELDGLWTTITIFITLFLLSVCYSATVTFFKVKWIFSSVVDLKQTIIPDYRNMIGQGA

SEQ ID NO: 853 - protein, 224 aa, Homo Sapiens
PSQRAALHLSVPRPAARVALVLSGCGVYDGTEIHEASAILVHLSRGGAEVQIFAPDVPQMHVIDHTKGQPSEGESRNVLTESARIARGKITDLANLSAANHDAAIFPGGFGAAKNLSTFAVDGKDCKVNKEVERVLKEFHQAGKPIGHSLKDLPGHCPGRPLKWSLRKRCRLRAPEGGPCCSRVTAGVKVSPMVSTSGSRPCQRSVPWMSAQREEPMALSSVTD

SEQ ID NO: 854 - protein, 143 aa, Homo Sapiens
SLSCFRPEPGNLAGVRHIILVLSGKGGVGKSTISTELALALRHAGKKVSALPLTGRSPGQLPASPWRPGGAPGLGCAAPCRWESWMWTCVAPVYPACSGRRAGLCTSATAAGHPSSWTGSRASRSCLWASCWRSRTRPWCGEA

SEQ ID NO: 855 - protein, 66 aa, Homo Sapiens
MTGLSMDGGGSPKGDVDPFYYDYETVRNGGLIFAGLAFIVGLLILLSRRFRCGGNKKRRQINEDEP

SEQ ID NO: 856 - protein, 120 aa, Homo Sapiens
MPPNLTGYYRFVSQKNMEDYLQALNISLAVRKIALLLKPDKEIEHQGNHMTVRTLSTFRNYTVQFDVGVEFEEDLRSVDGRKCQTIVTWEEEHLVCVQKGEVPNRGWRHWLEGEMLYLEL

SEQ ID NO: 857 - protein, 588 aa, Homo Sapiens [sequence omitted]

SEQ ID NO: 858 - protein, 208 aa, Homo Sapiens
MKLLTGLVFCSLVLSVSSRSFFSFLGEAFDGARDMWRAYSDMREANYIGSDKYFHARGNYDAAKRGPGGAWAAEVISTMRLFTGIVFCSLVMGVTSESWRSFFKEALQGVGDMGRAYWDIMISNHQNSNRYLYARGNYDAAQRGPGGVWAAKLISRSRVYLQGLIDCYLFGNSSTVLEDSKSNEKAEEWGRSGKDPDRFRPDGLPKKY

SEQ ID NO: 859 - protein, 346 aa, Homo Sapiens
MAMVSEFLKQAWFIENEEQEYVQTVKSSKGGPGSAVSPYPTFNPSSDVAALHKAIMVKGVDEATIIDILTKRNNAQRQQIKAAYLQETGKPLDETLKKALTGHLEEVVLALLKTPAQFDADELRAAMKGLGTDEDTLIEILASRTNKEIRDINRVYREELKRDLAKDITSDTSGDFRNALLSLAKGDRSEDFGVNEDLADSDARALYEAGERRKGTDVNVFNTILTTRSYPQLRRVFQKYTKYSKHDMNKVLDLELKGDIEKCLTAIVKCATSKPAFFAEKLHQAMKGVGTRHKALIRIMVSRSEIDMNDIKAFYQKMYGISLCQAILDETKGDYEKILVALCGGN

SEQ ID NO: 860 - protein, 617 aa, Homo Sapiens
MAESIIIRVQSPDGVKRITATKRETAATFLKKVAKEFGFQNNGFSVYINRNKTGEITASSNKSLNLLKIKHGDLLFLFPSSLAGPSSEMETSVPPGFKVFGAPNVVEDEIDQYLSKQDGKIYRSRDPQLCRHGPLGKCVHCVPLEPFDEDYLNHLEPPVKHMSFHAYIRKLTGGADKGKFVALENISCKIKSGCEGHLPWPNGICTKCQPSAITLNRQKYRHVDNIMFENHTVADRFLDFWRKTGNQHFGYLYGRYTEHKDIPLGIRAEVAAIYEPPQIGTQNSLELLEDPKAEVVDEIAAKLGLRKVGWIFTDLVSEDTRKGTVRYSRNKDTYFLSSEECITAGDFQNKHPNMCRLSPDGHFGSKFVTAVATGGPDNQVHFEGYQVSNQCMALVRDECLLPCKDAPELGYAKESSSEQYVPDVFYKDVDKFGNEITQLARPLPVEYLIIDITTTFPKDPVYTFSISQNPFPIENRDVLGETQDFHSLATYLSQNTSSVFLDTISDFHLLLFLVTNEVMPLQDSISLLLEAVRTRNEELAQTWKRSEQWATIEQLCSEYPHPLPRHPVAGAGEQPTLHSSPLPVVPWIPHPAASWQVPSAMQRVETRPPCQARGRLR

SEQ ID NO: 861 - protein, 2671 aa, Homo Sapiens
MAADTQVSETLKRFAGKVTTASVKERREILSELGKCVAGKDLPEGAVKGLCKLFCLTLHRYRDAASRRALQAAIQQLAEAQPEATAKNLLHSLQSSGIGSKAGVPSKSSGSAALLALTWTCLLVRIVFPSRAKRQGDIWNKLVEVQCLLLLEVLGGSHKHAVDGAVKKLTKLWKENPGLVEQYLSAILSLEPNQNYAGMLGLLVQFCTSHKEMDVVSQHKSALLDFYMKNILMSKVKPPKYLLDSCAPLLRYLSHSEFKDLILPTIQKSLLRSPENVIETISSLLASVTLDLSQYAMDIVKGLAGHLKSNSPRLMDEAVLALRNLARQCSDSSAMESLTKHLFAILGGSEGKLTVVAQKMSVLSGIGSVSHHVVSGPSSQVLNGIVAELFIPFLQQEVHEGTLVHAVSVLALWCNRFTMEVPKKLTEWFKKAFSLKTSTSAVRHAYLQCMLASYRGDTLLQALDLLPLLIQTVEKAASQSTQVPTITEGVAAALLLLKLSVADSQAEAKLSSFWQLIVDEKKQVFTSEKFLVMASEDALCTVLHLTERLFLDHPHRLTGNKVQQYHRALVAVLLSRTWHVRRQAQQTVRKLLSSLGGFKLAHGLLEELKTVLSSHKVLPLEALVTDAGEVTEAGKAYVPPRVLQEALCVISGVPGLKGDVTDTEQLAQEMLIISHHPSLVAVQSGLWPALLARMKIDPEAFITRHLDQIIPRMTTQSPLNQSSMNAMGSLSVLSPDRVLPQLISTITASVQNPALRLVTREEFAIMQTPAGELYDKSIIQSAQQDSIKKANMKRENKAYSFKEQIIELELKEEIKKKKGIKEEVQLTSKQKEMLQAQLDREAQVRRRLQELDGELEAALGLLDIILAKNPSGLTQYIPVLVDSFLPLLKSPLAAPRIKNPFLSLAACVMPSRLKALGTLVSHVTLRLLKPECVLDKSWCQEELSVAVKRAVMLLHTHTITSRVGKGEPGAAPLSAPAFSLVFPFLKMVLTEMPHHSEEEEEWMAQILQILTVQAQLRASPNTPPGRVDENGPELLPRVAMLRLLTWVIGTGSPRLQVLASDTLTTLCASSSGDDGCAFAEQEEVDVLLCALQSPCASVRETVLRGLMELHMVLPAPDTDEKNGLNLLRRLWVVKFDKEEEIRKLAERLWSMMGLDLQPDLCSLLIDDVIYHEAAVRQAGAEALSQAVARYQRQAAEVMGRLMEIYQEKLYRPPPVLDALGRVISESPPDQWEARCGLALALNKLSQYLDSSQVKPLFQFFVPDALNDRHPDVRKCMLDAALATLNTHGKENVNSLLPVFEEFLKNAPNDASYDAVRQSVVVLMGSLAKHLDKSDPKVKPIVAKLIAALSTPSQQVQESVASCLPPLVPAIKEDAGGMIQRLMQQLLESDKYAERKGAAYGLAGLVKGLGILSLKQQEMMAALTDAIQDKKNFRRREGALFAFEMLCTMLGKLFEPYVVHVLPHLLLCFGDGNQYVREAADDCAKAVMSNLSAHGVKLVLPSLLAALEEESWRTKAGSVELLGAMAYCAPKQLSSCLPNIVPKLTEVLTDSHVKVQKAGQQALRQIGSVIRNPEILAIAPVLLDALTDPSRKTQKCLQTLLDTKFVHFIDAPSLALIMPIVQRAFQDRSTDTRKMAAQIIGNMYSLTDQKDLAPYLPSVTPGLKASLLDPVPEVRTVSAKALGAMVKGMGESCFEDLLPWLMETLTYEQSSVDRSGAAQGLAEVMAGLGVEKLEKLMPEIVATASKVDIAPHVRDGYIMMFNYLPITFGDKFTPYVGPIIPCILKALADENEFVRDTALRAGQRVISMYAETAIALLLPQLEQGLFDDLWRIRFSSVQLLGDLLFHISGVTGKMTTETASEDDNFGTAQSNKAIITALGVERRNRVLAGLYMGRSDTQLVVRQASLHVWKIVVSNTPRTLREILPTLFGLLLGFLASTCADKRTIAARTLGDLVRKLGEKILPEIIPILEEGLRSQKSDERQGVCIGLSEIMKSTSRDAVLYFSESLVPTARKALCDPLEEVREAAAKTFEQLHSTIGHQALEDILPFLLKQLDDEEVSEFALDGLKQVMAIKSRVVLPYLVPKLTTPPVNTRVLAFLSSVAGDALTRHLGVILPAVMLALKEKLGTPDEQLEMANCQAVILSVEDDTGHRIIIEYLLEATRSPEVGMRQAAAIILNIYCSRSKADYTSHLRSLVSGLIRLFNDSSPVVLEESWDALNAITKKLDAGNQLALIEELHKEIRLIGNESKGEHVPGFCLPKKGVTSILPVLREGVLTGSPEQKEEAAKALGLVIRLTSADALRPSVVSITGPLIRILGDRFSWNVKAALLETLSLLLAKVGIALKPFLPQLQTTFTKALQDSNRGVRLKAADALGKLISIHIKVDPLFTELLNGIRAMEDPGVRDTMLQALRFVIQGAGAKVDAVIRKNIVSLLLSMLGHDEDNTRISSAGCLGELCAFLTEEELSAVLQQCLLADVSGIDWMVRHGRSLALSVAVNVAPGRLCAGRYSSDVQEMILSSATADRIPIAVSGVRGMGFLMRHHIETGGGQLPAKLSSLFVKCLQNPSSDIRLVAEKMIWWANKDPLPPLDPQAIKPILKALLDNTKDKNTVVRAYSDQAIVNLLKMRQGEEVFQSLSKILDVASLEVLNEVNRRSLKKLASQADSTEQVDDTILT

SEQ ID NO: 862 - protein, 166 aa, Homo Sapiens
MAATMFRATLRGWRTGVQRGCGLRLLSQTQGPPDYPRFVESVDEYQFVERLLPATRIPDPPKHEHYPTPSGWQPPRDPPPNLPYFVRRSRMHNIPVYKDITHGNRQMTVIRKVEGDIWALQKDVEDFLSPLLGKTPVTQVNEVTGTLRIKGYFDQELKAWLLEKGF

SEQ ID NO: 863 - protein, 204 aa, Homo Sapiens
MAEQEPTAEQLAQIAAENEEDEHSVNYKPPAQKSIQEIQELDKDDESLRKYKEALLGRVAVSADPNVPNVVVTGLTLVCSSAPGPLELDLTGDLESFKKQSFVLKEGVEYRIKISFRVNREIVSGMKYIQHTYRKGVKIDKTDYMVGSYGPRAEEYEFLTPVEEAPKGMLARGSYSIKSRFTDDDKTDHLSWEWNLTIKKDWKD

SEQ ID NO: 864 - protein, 327 aa, Homo Sapiens
MADGELNVDSLITRLLEVRGCRPGKIVQMTEAEVRGLCIKSREIFLSQPILLELEAPLKICGDIHGQYTDLLRLFEYGGFPPEANYLFLGDYVDRGKQSLETICLLLAYKIKYPENFFLLRGNHECASINRIYGFYDECKRRFNIKLWKTFTDCFNCLPIAAIVDEKIFCCHGGLSPDLQSMEQIRRIMRPTDVPDTGLLCDLLWSDPDKDVQGWGENDRGVSFTFGADVVSKFLNRHDLDLICRAHQVVEDGYEFFAKRQLVTLFSAPNYCGEFDNAGGMMSVDETLMCSFQILKPSEKKAKYQYGGLNSGRPVTPPRTANPPKKR

SEQ ID NO: 865 - protein, 235 aa, Homo Sapiens
MLSATRRACQLLLLHSLFPVPRMGNSASNIVSPQEALPGRKEQTPVAAKHHVNGNRTVEPFPEGTQMAVFGMGCFWGAERKFWVLKGVYSTQVGFAGGYTSNPTYKEVCSEKTGHAEVVRVVYQPEHMSFEELLKVFWENHDPTQGMRQGNDHGTQYRSAIYPTSAKQMEAALSSKENYQKVLSEHGFGPITTDIREGQTFYYAEDYHQQYLSKNPNGYCGLGGTGVSCPVGIKK

SEQ ID NO: 866 - protein, 1809 aa, Homo Sapiens
MQKDLLGQDVFLIGPPGPLRRSIAMQYLELTKREVEYIALSRDTTETDLKQRREIRAGTAFYIDQCAVRAATEGRTLILEGLEKAERNVLPVLNNLLENREMQLEDGRFLMSAERYDKLLRDHTKKELDSWKIVRVSENFRVIALGLPVPRYSGNPLDPPLRSRFQARDIYYLPFKDQLKLLYSIGANVSAEKVSQLLSFATTLCSQESSTLGLPDFPLDSLAAAVQILDSFPMMPIKHAIQWLYPYSILLGHEGKMAVEGVLKRFELQDSGSSLLPKEIVKVEKMMENHVSQASVTIRIADKEVTIKVPAGTRLLSQPCASDRFIQTLSHKQLQAEMMQSHMVKDICLIGGKGCGKTVIAKNFADTLGYNIEPIMLYQDMTARDLLQQRYTLPNGDTAWRSSPLVNAALEGKLVLLDGIHRVNAGTLAVLQRLIHDRELSLYDGSRLLREDRYMRLKEELQLSDEQLQKRSIFPIHPSFRIIALAEPPVIGSTAHQWLGPEFLTMFFFHYMKPLVKSEEIQVIKEKVPNVPQEALDKLLSFTHKLRETQDPTAQSLAASLSTRQLLRISRRLSQYPNENLHSAVTKACLSRFLPSLARSALEKNLADATIEINTDDNLEPELKDYKCEVTSGTLRIGAVSAPIYNAHEKMKVPDVLFYDNIQHVIVMEDMLKDFLLGEHLLLVGNQGVGKNKIVDRFLHLLNRPREYIQLHRDTTVQTLTLQPSVKDGLIVYEDSPLVKAVKLGHILVVDEADKAPTNVTCILKTLVENGEMILADGRRIVANSANVNGRENVVVIHPDFRMIVLANRPGFPFLGNDFFGTLGDIFSCHAVDNPKPHSELEMLRQYGPNVPEPILQKLVAAFGELRSLADQGIINYPYSTREVVNIVKHLQKFPTEGLSSVVRNVFDFDSYNNDMREILINTLHKYGIPIGAKPTSVQLAKELTLPEQTFMGYWTIGQARSGMQKLLCPVETHHIDIKGPALINIQEYPIERHEERSLNFTEECASWRIPLDEINIICDIATSHENEQNTLYVVTCNPASLYFMNMTGKSGFFVDFFDIFPRTANGVWHPFVTVAPLGSPLKGQVVLHEQQSNVILLLDTTGRALHRLILPSEKFTSKKPFWWNKEEAETYKMCKEFSHKNWLVFYKEKGNSLTVLDVLEGRTHTISLPINLKTVFLVAEDKWLLVESKTNQKYLLTKPAHIESEGSGVCQLYVLKEEPPSTGFGVTQETEFSIPHKISSDQLSSEHLSSAVEQKIASPNRILSDEKNYATIVVGFPDLMSPSEVYSWKRPSSLHKRSGTDTSFYRGKKKRGTPKQSNCVTLLDTNQVVRILPPGEVPLKDIYPKDVTPPQTSGYIEVTDLQSKKLRYIPIPRSESLSPYTTWLSTISDTDALLAEWDKSGVVTVDMGGHIRLWETGLERLQRSLMEWRNMIGQDDRNMQITINRDSGEDVSSPKHGKEDPDNMPHVGGNTWAGGTGGRDTAGLGGKGGPYRLDAGHTVYQVSQAEKDAVPEEVKRAAREMGQRAFQQRLKEIQMSEYDAATYERFSGAVRRQVHSLRIILDNLQAKGKERQWLRHQATGELDDAKIIDGLTGEKAIYKRRGELEPQLGSPQQKPKRLRLVVDVSGSMYRFNRMDGRLERTMEAVCMVMEAFENYEEKFQYDIVGHSGDGYNIGLVPMNKIPKDNKQRLEILKTMHAHSQFCMSGDHTLEGTEHAIKEIVKEEADEYFVIVLSDANLSRYGIHPAKFAQILTRDPQVNAFAIFIGSLGDQATRLQRTLPAGRSFVAMDTKDIPQILQQIFTSTMLSSV

SEQ ID NO: 867 - protein, 271 aa, Homo Sapiens
MAGLEVLFASAAPAITCRQDALVCFLHWEVVTHGYFGLGVGDQPGPNDKKSELLPAGWNNNKDLYVLRYEYKDGSRKLLVKAITVESSMILNVLEYGSQQVADLTLNLDDYIDAEHLGDFHRTYKNSEELRSRIVSGIITPIHEQWEKANVSSPHREFPPATAREVDPLRIPPHHPHTSRQPPWCDPLGPFVVGGEDLDPFGPRRGGMIVDPLRSGFPRALIDPSSGLPNRLPPGAVPPGARFDPFGPIGTSPPGPNPDHLPPPGYDDMYL

SEQ ID NO: 868 - protein, 913 aa, Homo Sapiens
MSRFFTTGSDSESESSLSGEELVTKPVGGNYGKQPLLLSEDEEDTKRVVRSAKDKRFEELTNLIRTIRNAMKIRDVTKCLEEFELLGKAYGKAKSIVDKEGVPRFYIRILADLEDYLNELWEDKEGKKKMNKNNAKALSTLRQKIRKYNRDFESHITSYKQNPEQSADEDAEKNEEDSEGSSDEDEDEDGVSAATFLKKKSEAPSGESRKFLKKMDDEDEDSEDSEDDEDWDTGSTSSDSDSEEEEGKQTALASRFLKKAPTTDEDKKAAEKKREDKAKKKHDRKSKRLDEEEEDNEGGEWERVRGGVPLVKEKPKMFAKGTEITHAVVIKKLNEILQARGKKGTDRAAQIELLQLLVQIAAENNLGEGVIVKIKFNIIASLYDYNPNLATYMKPEMWGKCLDCINELMDILFANPNIFVGENILEESENLHNADQPLRVRGCILTLVERMDEEFTKIMQNTDPHSQEYVEHLKDEAQVCAIIERVQRYLEEKGTTEEVCRIYLLRILHTYYKFDYKAHQRQLTPPEGSSKSEQDQAENEGEDSAVLMERLCKYIYAKDRTDRIRTCAILCHIYHHALHSRWYQARDLMLMSHLQDNIQHADPPVQILYNRTMVQLGICAFRQGLTKDAHNALLDIQSSGRAKELLGQGLLLRSLQERNQEQEKVERRRQVPFHLHINLELLECVYLVSAMLLEIPYMAAHESDARRRMISKQFHHQLRVGERQPLLGPPESMREHVVAASKAMKMGDWKTCHSFIINEKMNGKVWDLFPEADKVRTMLVRKIQEESLRTYLFTYSSVYDSISMETLSDMFELDLPTVHSIISKMIINEELMASLDQPTQTVVMHRTEPTAQQNLALQLAEKLGSLVENNERVFDHKQGTYGGYFRDQKDGYRKNEGYMRRGGYRQQQSQTAY

SEQ ID NO: 869 - protein, 541 aa, Homo Sapiens
MFSWMGRQAGGRERAGGADAVQTVTGGLRSLYLRKVLPLEEAYRFHEFHSPALEDADFENKPMILLVGQYSTGKTTFIRYLLEQDFPGMRIGPEPTTDSFIAVMYGETEGSTPGNALVVDPKKPFRKLSRFGNAFLNRFMCSQLPNQVLKSISVIDSPGILSGEKQRISRGYDFCQVLQWFAERVDRIILLFDAHKLDISDEFSEAIKAFRGQDDKIRVVLNKADQVDTQQLMRVYGALMWSLGKVINTPEVLRVYIGSFWAQPLQNTDNRRLFEAEAQDLFRDIQSLPQKAAVRKLNDLIKRARLAKVHAYIISYLKKEMPSVFGKENKKRELISRLPEIYIQLQREYQISAGDFPEVKAMQEQLENYDFTKFHSLKPKLIEAVDNMLSNKISPLMNLISQEETSTPTQLVQGGAFDGTTEGPFNQGYGEGAKEGADEEEWVVAKDKPVYDELFYTLSPINGKISGVNAKKEMVTSKLPNSVLGKIWKLADCDCDGMLDEEEFALAKHLIKIKLDGYELPSSLPPHLVPPSHRKSLPKAD

SEQ ID NO: 870 - protein, 1575 aa, Homo Sapiens
MPHEELPSLQRPRYGSIVDDERLSAEEMDERRRQNIAYEYLCHLEEAKRWMEVCLVEELPPTTELEEGLRNGVYLAKLAKFFAPKMVSEKKIYDVEQTRYKKSGLHFRHTDNTVQWLRAMESIGLPKIFYPETTDVYDRKNIPRMIYCIHALSLYLFKLGIAPQIQDLLGKVDFTEEEISNMRKELEKYGIQMPSFSKIGGILANELSVDEAALHAAVIAINEAVEKGIAEQTVVTLRNPNAVLTLVDDNLAPEYQKELWDAKKKKEENARLKNSCISEEERDAYEELLTQAEIQGNINKVNRQAAVDHINAVIPEGDPENTLLALKKPEAQLPAVYPFAAAMYQNELFNLQKQNTMNYLAHEELLIAVEMLSAVALLNQALESNDLVSVQNQLRSPAIGLNNLDKAYVERYANTLLSVKLEVLSQGQDNLSWNEIQNCIDMVNAQIQEENDRVVAVGYINEAIDEGNPLRTLETLLLPTANISDVDPAHAQHYQDVLYHAKSQKLGDSESVSKVLWLDEIQQAVDDANVDKDRAKQWVTLVVDVNQCLEGKKSSDILSVLKSSTSNANDIIPECADKYYDALVKAKELKSERVSSDGSWLKLNLHKKYDYYYNTDSKESSWVTPESCLYKESWLTGKEIEDIIEEVTVGYIRENIWSASEELLLRFQATSSGPILREEFEARKSFLHEQEENVVKIQAFWKGYKQRKEYMHRRQTFIDNTDSIVKIQSWFRMATARKSYLSRLQYFRDHNNEIVKIQSLLRANKARDDYKTLVGSENPPLTVIRKFVYLLDQSDLDFQEELEVARLREEVVTKIRANQQLEKDLNLMDIKIGLLVKNRITLEDVISHSKKLNKKKGGEMEILNNTDNQGIKSLSKERRKTLETYQQLFYLLQTNPLYLAKLIFQMPQNKSTKFMDTVIFTLYNYASNQREEYLLLKLFKTALEEEIKSKVDQVQDIVTGNPTVIKMVVSFNRGARGQNTLRQLLAPVVKEIIDDKSLIINTNPVEVYKAWVNQLETQTGEASKLPYDVTTEQALTYPEVKNKLEASIENLRRVTDKVLNSIISSLDLLPYGLRYIAKVLKNSIHEKFPDATEDELLKIVGNLLYYRYMNPAIVAPDGFDIIDMTAGGQINSDQRRNLGSVAKVLQHAASNKLFEGENEHLSSMNNYLSETYQEFRKYFKEACNVPEPEEKFNMDKYTDLVTVSKPVIYISIEEIISTHSLLLEHQDAIAPEKNDLLSELLGSLGEVPTVESFLGEGAVDPNDPNKANTLSQLSKTEISLVLTSKYDIEDGEAIDSRSLMIKTKKLIIDVIRNQPGNTLTEILETPATAQQEVDHATDMVSRAMIDSRTPEEMKHSQSMIEDAQLPLEQKKRKIQRNLRTLEQTGHVSSENKYQDILNEIAKDIRNQRIYRKLRKAELAKLQQTLNALNKKAAFYEEQINYYDTYIKTCLDNLKRKNTRRSIKLDGKGEPKGAKRAKPVKYTAAKLHEKGVLLDIDDLQTNQFKNVTFDIIATEDVGIFDVRSKFLGVEMEKVQLNIQDLLQMQYEGVAVMKMFDKVKVNVNLLIYLLNKKFYGK

SEQ ID NO: 871 - protein, 491 aa, Homo Sapiens
MASRCWRWWGWSAWPRTRLPPAGSTPSFCHHFSTQEKTPQICVVGSGPAGFYTAQHLLKHPQAHVDIYEKQPVPFGLVRFGVAPDHPEVKNVINTFTQTAHSGRCAFWGNVEVGRDVTVPELREAYHAVVLSYGAEDHRALEIPGEELPGVCSARAFVGWYNGLPENQELEPDLSCDTAVILGQGNVALDVARILLTPPEHLERTDITKAALGVLRQSRVKTVWLVGRRGPLQVAFTIKELREMIQLPGARPILDPVDFLGLQDKIKEVPRPRKRLTELLLRTATEKPGPAEAARQASASRAWGLRFFRSPQQVLPSPDGRRAAGVRLAVTRLEGVDEATRAVPTGDMEDLPCGLVLSSIGYKSRPVDPSVPFDSKLGVIPNVEGRVMDVPGLYCSGWVKRGPTGVIATTMTDSFLTGQMLLQDLKAGLLPSGPRPGYAAIQALLSSRGVRPVSFSDWEKLDAEEVARGQGTGKPREKLVDPQEMLRLLGH

SEQ ID NO: 872 - protein, 449 aa, Homo Sapiens
MMKTLLLFVGLLLTWESGQVLGDQTVSDNELQEMSNQGSKYVNKEIQNAVNGVKQIKTLIEKTNEERKTLLSNLEEAKKKKEDALNETRESETKLKELPGVCNETMMALWEECKPCLKQTCMKFYARVCRSGSGLVGRQLEEFLNQSSPFYFWMNGDRIDSLLENDRQQTHMLDVMQDHFSRASSIIDELFQDRFFTREPQDTYHYLPFSLPHRRPHFFFPKSRIVRSLMPFSPYEPLNFHAMFQPFLEMIHEAQQAMDIHFHSPAFQHPPTEFIREGDDDRTVCREIRHNSTGCLRMKDQCDKCREILSVDCSTNNPSQAKLRRELDESLQVAERLTRKYNELLKSYQWKMLNTSSLLEQLNEQFNWVSRLANLTQGEDQYYLRVTTVASHTSDSDVPSGVTEVVVKLFDSDPITVTVPVEVSRKNPKFMETVAEKALQEYRKKHREE

SEQ ID NO: 873 - protein, 914 aa, Homo Sapiens
MKPPRPVRTCSKVLVLLSLLAIHQTTTAEKNGIDIYSLTVDSRVSSRFAHTVVTSRVVNRANTVQEATFQMELPKKAFITNFSMIIDGMTYPGIIKEKAEAQAQYSAAVAKGKSAGLVKATGRNMEQFQVSVSVAPNAKITFELVYEELLKRRLGVYELLLKVRPQQLVKHLQMDIHIFEPQGISFLETESTFMTNQLVDALTTWQNKTKAHIRFKPTLSQQQKSPEQQETVLDGNLIIRYDVDRAISGGSIQIENGYFVHYFAPEGLTTMPKNVVFVIDKSGSMSGRKIQQTREALIKILDDLSPRDQFNLIVFSTEATQWRPSLVPASAENVNKARSFAAGIQALGGTNINDAMLMAVQLLDSSNQEERLPEGSVSLIILLTDGDPTVGETNPRSIQNNVREAVSGRYSLFCLGFGFDVSYAFLEKLALDNGGLARRIHEDSDSALQLQDFYQEVANPLLTAVTFEYPSNAVEEVTQNNFRLLFKGSEMVVAGKLQDRGPDVLTATVSGKLPTQNITFQTESSVAEQEAEFQSPKYIFHNFMERLWAYLTIQQLLEQTVSASDADQQALRNQALNLSLAYSFVTPLTSMVVTKPDDQEQSQVAEKPMEGESRNRNVHSAGAAGSRMNFRPGVLSSRQLGLPGPPDVPDHAAYHPFRRLAILPASAPPATSNPDPAVSRVMNMKIEETTMTTQTPACPSCSRSRAPAVPAPIQAPSAILPLPGQSVERLCVDPRHRQGPVNLLSDPEQGVEVTGQYEREKAGFSWIEVTFKNPLVWVHASPEHVVVTRNRRSSAYKWKETLFSVMPGLKMTMDKTGLLLLSDPDKVTIGLLFWDGRGEGLRLLLRDTDRFSSHVGGTLGQFYQEVLWGSPAASDDGRRTLRVQGNDHSATRERRLDYQEGPPGVEISCWSVEL

SEQ ID NO: 874 - protein, 469 aa, Homo Sapiens [sequence omitted]

SEQ ID NO: 875 - protein, 491 aa, Homo Sapiens
MKRMVSWSFHKLKTMKHLLLLLLCVFLVKSQGVNDNEEGFFSARGHRPLDKKREEAPSLRPAPPPISGGGYRARPAKAAATQKKVERKAPDAGGCLHADPDLGVLCPTGCQLQEALLQQERPIRNSVDELNNNVEAVSQTSSSSFQYMYLLKDLWQKRQKQVKDNENVVNEYSSELEKHQLYIDETVNSNIPTNLRVLRSILENLRSKIQKLESDVSAQMEYCRTPCTVSCNIPVVSGKECEEIIRKGGETSEMYLIQPDSSVKPYRVYCDMNTENGGWTVIQNRQDGSVDFGRKWDPYKQGFGNVATNTDGKNYCGLPGEYWLGNDKISQLTRMGPTELLIEMEDWKGDKVKAHYGGFTVQNEANKYQISVNKYRGTAGNALMDGASQLMGENRTMTIHNGMFFSTYDRDNDGWLTSDPRKQCSKEDGGGWWYNRCHAANPNGRYYWGGQYTWDMAKHGTDDGVVWMNWKGSWYSMRKMSMKIRPFFPQQ

SEQ ID NO: 876 - protein, 307 aa, Homo Sapiens
MTKAGSKGGNLRDKLDGNELDLSLSDLNEVPVKELAALPKATILDLSCNKLTTLPSDFCGLTHLVKLDLSKNKLQQLPADFGRLVNLQHLDLLNNKLVTLPVSFAQLKNLKWLDLKDNPLDPVLAKVAGDCLDEKQCKQCANKVLQHMKAVQADQERERQRRLEVEREAEKKREAKQRAKEAQERELRKREKAEEKERRRKEYDALKAAKREQEKKPKKEANQAPKSKSGSRPRKPPPRKHTRSWAVLKLLLLLLLFGVAGGLVACRVTELQQQPLCTSVNTIYDNAVQGLRRHEILQWVLQTDSQQ

SEQ ID NO: 877 - protein, 389 aa, Homo Sapiens
MIRNGRGAAGGAEQPGPGGRRAVRVWCDGCYDMVHYGHSNQLRQARAMGDYLIVGVHTDEEIAKHKGPPVFTQEERYKMVQAIKWVDEVVPAAPYVTTLETLDKYNCDFCVHGNDITLTVDGRDTYEEVKQAGRYRECKRTQGVSTTDLVGRMLLVTKAHHSSQEMSSEYREYADSFGKCPGGRNPWTGVSQFLQTSQKIIQFASGKEPQPGETVIYVAGAFDLFHIGHVDFLEKVHRLAERPYIIAGLHFDQEVNHYKGKNYPIMNLHERTLSVLACRYVSEVVIGAPYAVTAELLSHFKVDLVCHGKTEIIPDRDGSDPYQEPKRRGIFRQIDSGSNLTTDLIVQRIITNRLEYEARNQKKEAKELAFLEAARQQAAQPLGERDGDF

SEQ ID NO: 878 - protein, 1140 aa, Homo Sapiens [sequence omitted]

SEQ ID NO: 879 - protein, 1010 aa, Homo Sapiens
MAARVLIIGSGGREHTLAWKLAQSHHVKQVLVAPGNAGTACSEKISNTAISISDHTALAQFCKEKKIEFVVVGPEAPLAAGIVGNLRSAGVQCFGPTAEAAQLESSKRFAKEFMDRHGIPTAQWKAFTKPEEACSFILSADFPALVVKASGLAAGKGVIVAKSKEEACKAVQEIMQEKAFGAAGETIVIEELLDGEEVSCLCFTDGKTVAPMPPAQDHKRLLEGDGGPNTGGMGAYCPAPQVSNDLLLKIKDTVLQRTVDGMQQEGTPYTGILYAGIMLTKNGPKVLEFNCRFGDPECQVILPLLKSDLYEVIQSTLDGLLCTSLPVWLENHTALTVVMASKGYPGDYTKGVEITGFPEAQALGLEVFHAGTALKNGKVVTHGGRVLAVTAIRENLISALEEAKKGLAAIKFEGAIYRKDVGFRAIAFLQQPRSLTYKESGVDIAAGNMLVKKIQPLAKATSRSGCKVDLGGFAGLFDLKAAGFKDPLLASGTDGVGTKLKIAQLCNKHDTIGQDLVAMCVNDILAQGAEPLFFLDYFSCGKLDLSVTEAVVAGIAKACGKAGCALLGGETAEMPDMYPPGEYDLAGFAVGAMERDQKLPHLERITEGDVVVGIASSGLHSNGFSLVRKIVAKSSLQYSSPAPDGCGDQTLGDLLLTPTRIYSHSLLPVLRSGHVKAFAHITGGGLLENIPRVLPEKLGVDLDAQTWRIPRVFSWLQQEGHLSEEEMARTFNCGVGAVLVVSKEQTEQILRDIQQHKEEAWVIGSVVARAEGSPRVKVKNLIESMQINGSVLKNGSLTNHFSFEKKKARVAVLISGTGSNLQALIDSTREPNSSAQIDIVISNKAAVAGLDKAERAGIPTRVINHKLYKNRVEFDSAIDLVLEEFSIDIVCLAGFMRILSGPFVQKWNGKMLNIHPSLLPSFKGSNAHEQALETGVTVTGCTVHFVAEDVDAGQIILQEAVPVKRGDTVATLSERVKLAEHKIFPAALQLVASGTVQLGENGKICWVKEE

SEQ ID NO: 880 - protein, 1748 aa, Homo Sapiens
MSARAAAAKSTAMEETAIWEQHTVTLHRAPGFGFGIAISGGRDNPHFQSGETSIVISDVLKGGPAEGQLQENDRVAMVNGVSMDNVEHAFAVQQLRKSGKNAKITIRRKKKVQIPVSRPDPEPVSDNEEDSYDEEIHDPRSGRSGVVNRRSEKIWPRDRSASRERSLSPRSDRRSVASSQPAKPTKVTLVKSRKNEEYGLRLASHIFVKEISQDSLAARDGNIQEGDVVLKINGTVTENMSLTDAKTLIERSKGKLKMVVQRDERATLLNVPDLSDSIHSANASERDDISEIQSLASDHSGRSHDRPPRRSRSRSPDQRSEPSDHSRHSPQQPSNGSLRSRDEERISKPGAVSTPVKHADDHTPKTVEEVTVERNEKQTPSLPEPKPVYAQVGQPDVDLPVSPSDGVLPNSTHEDGILRPSMKLVKFRKGDSVGLRLAGGNDVGIFVAGVLEDSPAAKEGLEEGDQILRVNNVDFTNIIREEAVLFLLDLPKGEEVTILAQKKKDVYRRIVESDVGDSFYIRTHFEYEKESPYGLSFNKGEVFRVVDTLYNGKLGSWLAIRIGKNHKEVERGIIPNKNRAEQLASVQYTLPKTAGGDRADFWRFRGLRSSKRNLRKSREDLSAQPVQTKFPAYERVVLREAGFLRPVTIFGPIADVAREKLAREEPDIYQIAKSEPRDAGTDQRSSGIIRLHTIKQIIDQDKHALLDVTPNAVDRLNYAQWYPIVVFLNPDSKQGVKTMRMRLCPESRKSARKLYERSHKLRKNNHHLFTTTINLNSMNDGWYGALKEAIQQQQNQLVWVSEGKADGATSDDLDLHDDRLSYLSAPGSEYSMYSTDSRHTSDYEDTDTEGGAYTDQELDETLNDEVGTPPESAITRSSEPVREDSSGMHHENQTYPPYSPQAQPQPIHRIDSPGFKPASQQKAEASSPVPYLSPETNPASSTSAVNHNVNLTNVRLEEPTPAPSTSYSPQADSLRTPSTEAAHIMLRDQEPSLSSHVDPTKVYRKDPYPEEMMRQNHVLKQPAVSHPGHRPDKEPNLTYEPQLPYVEKQASRDLEQPTYRYESSSYTDQFSRNYEHRLRYEDRVPMYEEQWSYYDDKQPYPSRPPFDNQHSQDLDSRQHPEESSERGYFPRFEEPAPLSYDSRPRYEQAPRASALRHEEQPAPGYDTHGRLRPEAQPHPSAGPKPAESKQYFEQYSRSYEQVPPQGFTSRAGHFEPLHGAAAVPPLIPSSQHKPEALPSNTKPLPPPPTQTEEEEDPAMKPQSVLTRVKMFENKRSASLETKKDVNDTGSFKPPEVASKPSGAPIIGPKPTSQNQFSEHDKTLYRIPEPQKPQLKPPEDIVRSNHYDPEEDEEYYRKQLSYFDRRSFENKPPAHIAASHLSEPAKPAHSQNQSNFSSYSSKGKPPEADGVDRSFGEKRYEPIQATPPPPPLPSQYAQPSQPVTSASLHIHSKGAHGEGNSVSLDFQNSLVSKPDPPPSQNKPATFRPPNREDTAQAAFYPQKSFPDKAPVNGTEQTQKTVTPAYNRFTPKPYTSSARPFERKFESPKFNHNLLPSETAHKPDLSSKTPTSPKTLVKSHSLAQPPEFDSGVETFSIHAEKPKYQINNISTVPKAIPVSPSAVEEDEDEDGHTVVATARGIFNSNGGVLSSIETGVSIIIPQGAIPEGVEQEIYFKVCRDNSILPPLDKEKGETLLSPLVMCGPHGLKFLKPVELRLPHCDPKTWQNKCLPGDPNYLVGANCVSVLIDHF

SEQ ID NO: 881 - protein, 2211 aa, Homo Sapiens
MLRGPGPGLLLLAVQCLGTAVPSTGASKSKRQAQQMVQPQSPVAVSQSKPGCYDNGKHYQINQQWERTYLGNALVCTCYGGSRGFNCESKPEAEETCFDKYTGNTYRVGDTYERPKDSMIWDCTCIGAGRGRISCTIANRCHEGGQSYKIGDTWRRPHETGGYMLECVCLGNGKGEWTCKPIAEKCFDHAAGTSYVVGETWEKPYQGWMMVDCTCLGEGSGRITCTSRNRCNDQDTRTSYRIGDTWSKKDNRGNLLQCICTGNGRGEWKCERHTSVQTTSSGSGPFTDVRAAVYQPQPHPQPPPYGHCVTDSGVVYSVGMQWLKTQGNKQMLCTCLGNGVSCQETAVTQTYGGNSNGEPCVLPFTYNGRTFYSCTTEGRQDGHLWCSTTSNYEQDQKYSFCTDHTVLVQTRGGNSNGALCHFPFLYNNHNYTDCTSEGRRDNMKWCGTTQNYDADQKFGFCPMAAHEEICTTNEGVMYRIGDQWDKQHDMGHMMRCTCVGNGRGEWTCIAYSQLRDQCIVDDITYNVNDTFHKRHEEGHMLNCTCFGQGRGRWKCDPVDQCQDSETGTFYQIGDSWEKYVHGVRYQCYCYGRGIGEWHCQPLQTYPSSSGPVEVFITETPSQPNSHPIQWNAPQPSHISKYILRWRPKNSVGRWKEATIPGHLNSYTIKGLKPGVVYEGQLISIQQYGHQEVTRFDFTTTSTSTPVTSNTVTGETTPFSPLVATSESVTEITASSFVVSWVSASDTVSGFRVEYELSEEGDEPQYLDLPSTATSVNIPDLLPGRKYIVNVYQISEDGEQSLILSTSQTTAPDAPPDTTVDQVDDTSIVVRWSRPQAPITGYRIVYSPSVEGSSTELNLPETANSVTLSDLQPGVQYNITIYAVEENQESTPVVIQQETTGTPRSDTVPSPRDLQFVEVTDVKVTIMWTPPESAVTGYRVDVIPVNLPGEHGQRLPISRNTFAEVTGLSPGVTYYFKVFAVSHGRESKPLTAQQTTKLDAPTNLQFVNETDSTVLVRWTPPRAQITGYRLTVGLTRRGQPRQYNVGPSVSKYPLRNLQPASEYTVSLVAIKGNQESPKATGVFTTLQPGSSIPPYNTEVTETTIVITWTPAPRIGFKLGVRPSQGGEAPREVTSDSGSIVVSGLTPGVEYVYTIQVLRDGQERDAPIVNKVVTPLSPPTNLHLEANPDTGVLTVSWERSTTPDITGYRITTTPTNGQQGNSLEEVVHADQSSCTFDNLSPGLEYNVSVYTVKDDKESVPISDTIIPAVPPPTDLRFTNIGPDTMRVTWAPPPSIDLTNFLVRYSPVKNEEDVAELSISPSDNAVVLTNLLPGTEYVVSVSSVYEQHESTPLRGRQKTGLDSPTGIDFSDITANSFTVHWIAPRATITGYRIRHHPEHFSGRPREDRVPHSRNSITLTNLTPGTEYVVSIVALNGREESPLLIGQQSTVSDVPRDLEVVAATPTSLLISWDAPAVTVRYYRITYGETGGNSPVQEFTVPGSKSTATISGLKPGVDYTITVYAVTGRGDSPASSKPISINYRTEIDKPSQMQVTDVQDNSISVKWLPSSSPVTGYRVTTTPKNGPGPTKTKTAGPDQTEMTIEGLQPTVEYVVSVYAQNPSGESQPLVQTAVTNIDRPKGLAFTDVDVDSIKIAWESPQGQVSRYRVTYSSPEDGIHELFPAPDGEEDTAELQGLRPGSEYTVSVVALHDDMESQPLIGTQSTAIPAPTDLKFTQVTPTSLSAQWTPPNVQLTGYRVRVTPKEKTGPMKEINLAPDSSSVVVSGLMVATKYEVSVYALKDTLTSRPAQGVVTTLENVSPPRRARVTDATETTITISWRTKTETITGFQVDAVPANGQTPIQRTIKPDVRSYTITGLQPGTDYKIYLYTLNDNARSSPVVIDASTAIDAPSNLRFLATTPNSLLVSWQPPRARITGYIIKYEKPGSPPREVVPRPRPGVTEATITGLEPGTEYTIYVIALKNNQKSEPLIGRKKTGQEALSQTTISWAPFQDTSEYIISCHPVGTDEEPLQFRVPGTSTSATLTGLTRGATYNVIVEALKDQQRHKVREEVVTVGNSRWCHDNGVNYKIGEKWDRQGENGQMMSCTCLGNGKGEFKCDPHEATCYDDGKTYHVGEQWQKEYLGAICSCTCFGGQRGWRCDNCRRPGGEPSPEGTTGQSYNQYSQRYHQRTNTNVNCPIECFMPLDVQADREDSRE

SEQ ID NO: 882 - protein, 328 aa, Homo Sapiens
MAAGIVASRRLRDLLTRRLTGSNYPGLSISLRLTGSSAQEEASGVALGEAPDHSYESLRVTSAQKHVLHVQLNRPNKRNAMNKVFWREMVECFNKISRDADCRAVVISGAGKMFTAGIDLMDMASDILQPKGDDVARISWYLRDIITRYQETFNVIERCPKPVIAAVHGGCIGGGVDLVTACDIRYCAQDAFFQVKEVDVGLAADVGTLQRLPKVIGNQSLVNELAFTARKMMADEALGSGLVSRVFPDKEVMLDAALALAAEISSKSPVAVQSTKVNLLYSRDHSVAESLNYVASWNMSMLQTQDLVKSVQATTENKELKTVTFSKL

SEQ ID NO: 883 - protein, 490 aa, Homo Sapiens [sequence omitted]

SEQ ID NO: 884 - protein, 482 aa, Homo Sapiens
MAAVRMLRTWSRNAGKLICVRYFQTCGNVHVLKPNYVCFFGYPSFKYSHPHHFLKTTAALRGQVVQFKLSDIGEGIREVTVKEWYVKEGDTVSQFDSICEVQSDKASVTITSRYDGVIKKLYYNLDDIAYVGKPLVDIETEALKDSEEDVVETPAVSHDEHTHQEIKGRKTLATPAVRRLAMENNIKLSEVVGSGKDGRILKEDILNYLEKQTGAILPPSPKVEIMPPPPKPKDMTVPILVSKPPVFTGKDKTEPIKGFQKAMVKTMSAALKIPHFGYCDEIDLTELVKLREELKPIAFARGIKLSFMPFFLKAASLGLLQFPILNASVDENCQNITYKASHNIGIAMDTEQGLIVPNVKNVQICSIFDIATELNRLQKLGSVGQLSTTDLTGGTFTLSNIGSIGGTFAKPVIMPPEVAIGALGSIKAIPRFNQKGEVYKAQIMNVSWSADHRVIDGATMSRFSNLWKSYLENPAFMLLDLK

SEQ ID NO: 885 - protein, 541 aa, Homo Sapiens
MASMGTLAFDEYGRPFLIIKDQDRKSRLMGLEALKSHIMAAKAVANTMRTSLGPNGLDKMMVDKDGDVTVTNDGATILSMMDVDHQIAKLMVELSKSQDDEIGDGTTGVVVLAGALLEEAEQLLDRGIHPIRIADGYEQAARVAIEHLDKISDSVLVDIKDTEPLIQTAKTTLGSKVVNSCHRQMAEIAVNAVLTVADMERRDVDFELIKVEGKVGGRLEDTKLIKGVIVDKDFSHPQMPKKVEDAKIAILTCPFEPPKPKTKHKLDVTSVEDYKALQKYEKEKFEEMIQQIKETGANLAICQWGFDDEANHLLLQNNLPAVRWVGGPEIELIAIATGGRIVPRFSELTAEKLGFAGLVQEISFGTTKDKMLVIEQCKNSRAVTIFIRGGNKMIIEEAKRSLHDALCVIRNLIRDNRVVYGGGAAEISCALAVSQEADKCPTLEQYAMRAFADALEVIPMALSENSGMNPIQTMTEVRARQVKEMNPALGIDCLHKGTNDMKQQHVIETLIGKKQQISLATQMVRMILKIDDIRKPGESEE

SEQ ID NO: 886 - protein, 410 aa, Homo Sapiens
MVCFRLFPVPGSGLVLVCLVLGAVRSYALELNLTDSENATCLYAKWQMNFTVRYETTNKTYKTVTISDHGTVTYNGSICGDDQNGPKIAVQFGPGFSWIANFTKAASTYSIDSVSFSYNTGDNTTFPDAEDKGILTVDELLAIRIPLNDLFRCNSLSTLEKNDVVQHYWDVLVQAFVQNGTVSTNEFLCDKDKTSTVAPTIHTTVPSPTTTPTPKEKPEAGTYSVNNGNDTCLLATMGLQLNITQDKVASVININPNTTHSTGSCRSHTALLRLNSSTIKYLDFVFAVKNENRFYLKEVNISMYLVNGSVFSIANNNLSYWDAPLGSSYMCNKEQTVSVSGAFQINTFDLRVQPFNVTQGKYSTAQDCSADDDNFLVPIAVGAALAGVLILVLLAYFIGLKHHHAGYEQF

SEQ ID NO: 887 - protein, 430 aa, Homo Sapiens
MSFTTRSTFSTNYRSLGSVQAPSYGARPVSSAASVYAGAGGSGSRISVSRSTSFRGGMGSGGLATGIAGGLAGMGGIQNEKETMQSLNDRLASYLDRVRSLETENRRLESKIREHLEKKGPQVRDWSHYFKIIEDLRAQIFANTVDNARIVLQIDNARLAADDFRVKYETELAMRQSVENDIHGLRKVIDDTNITRLQLETEIEALKEELLFMKKNHEEEVKGLQAQIASSGLTVEVDAPKSQDLAKIMADIRAQYDELARKNREELDKYWSQQIEESTTVVTTQSAEVGAAETTLTELRRTVQSLEIDLDSMRNLKASLENSLREVEARYALQMEQLNGILLHLESELAQTRAEGQRQAQEYEALLNIKVKLEAEIATYRRLLEDGEDFNLGDALDSSNSMQTIQKTTTRRIVDGKVVSETNDTKVLRH

SEQ ID NO: 888 - protein, 411 aa, Homo Sapiens
MTHWFHRNPLKATAPVSFNYYGVVTGPSASKICNDLRSSRARLLELFTDLSCNPEMMKNAADSYFSLLQGFINSLDESTQESKLRYIQNFKWTDTLQGQVPSAQQDAVFELISMGFNVALWYTKYASRLAGKENITEDEAKEVHRSLKIAAGIFKHLKESHLPKLITPAEKGRDLESRLIEAYVIQCQAEAQEVTIARAIELKHAPGLIAALAYETANFYQKADHTLSSLEPAYSAKWRKYLHLKMCFYTAYAYCYHGETLLASDKCGEAIRSLQEAEKLYAKAEALCKEYGETKGPGPTVKPSGHLFFRKLGNLVKNTLEKCQRENGFIYFQKIPTEAPQLELKANYGLVEPIPFEFPPTSVQWTPETLAAFDLTKRPKDDSTKPKPEEEVKPVKEPDIKPQKDTGCYIS

SEQ ID NO: 889 - protein, 363 aa, Homo Sapiens
MAPAGRPGAKKGILERLESGEVVIGDGSFLITLEKRGYVKAGLWTPEAVIEHPDAVRQLHMEFLRAGSNVMQTFTFSASEDNMESKWEDVNAAACDLAREVAGKGDALVAGGICQTSIYKYQKDEARIKKLFRQQLEVFAWKNVDFLIAEYFEHVEEAVWAVEVLKESDRPVAVTMCIGPEGDMHDITPGECAVRLVKAGASIVGVNCRFGPDTSLKTMELMKEGLEWAGLKAHLMVQPLGFHAPDCGKEGFVDLPEYPFGLESRVATRWDIQKYAREAYNLGVRYIGGCCGFEPYHIRAIAEELAPERGFLPPASEKHGSWGSGLDMHTKPWIRARARREYWENLLPASGRPFCPSLSKPDF

SEQ ID NO: 890 - protein, 609 aa, Homo Sapiens [sequence omitted]

SEQ ID NO: 891 - protein, 105 aa, Homo Sapiens
MGDVEKGKKIFIMKCSQCHTVEKGGKHKTGPNLHGLFGRKTGQAPGYSYTAANKNKGIIWGEDTLMEYLENPKKYIPGTKMIFVGIKKKEERADLIAYLKKATNE

SEQ ID NO: 892 - protein, 204 aa, Homo Sapiens
MNLILRYTFSKMAMVSEFLKQAWFIENEEQEYVQTVKSSKGGPGSAVSPYPTFNPSSDVAALHKAIMVKGVDEATIIDILTKRNNAQRQQIKAAYLQETGKPLDETLKKALTGHLEEVVLALLKTPAQFDADELRAAMKGLGTDEDTLIEILASRTNKEIRDINRVYREELKRDLAKDITSDTSGDFRNALLSLAKGDRSEDFG

SEQ ID NO: 893 - protein, 216 aa, Homo Sapiens
MERMLPLLALGLLAAGFCPAVLCHPNSPLDEENLTQENQDRGTHVDLGLASANVDFAFSLYKQLVLKAPDKNVIFSPLSISTALAFLSLGAHNTTLTEILKGLKFNLTETSEAEIHQSFQHLLRTLNQSSDELQLSMGNAMFVKEQLSLLDRFTEDAKRLYGSEAFATDFQDSAAAKKLINDYVKNGTRGKITDLIKDLDSQTMMVLVNYIFFKER

SEQ ID NO: 894 - protein, 152 aa, Homo Sapiens
MAVLSKEYGFVLLTGAASFIMVAHLAINVSKARKKYKVEYPIMYSTDPENGHIFNCIQRAHQNTLEVYPPFLFFLAVGGVYHPRIASGLGLAWIVGRVLYAYGYYTGEPSKRSRGALGSIALLGLVGTTVCSAFQHLGWVKSGLGSGPKCCH

SEQ ID NO: 895 - protein, 415 aa, Homo Sapiens
MSPFLYLVLLVLGLHATIHCASPEGKVTACHSSQPNATLYKMSSINADFAFNLYRRFTVETPDKNIFFSPVSISAALVMLSFGACCSTQTEIVETLGFNLTDTPMVEIQHGFQHLICSLNFPKKELELQIGNALFIGKHLKPLAKFLNDVKTLYETEVFSTDFSNISAAKQEINSHVEMQTKGKVVGLIQDLKPNTIMVLVNYIHFKAQWANPFDPSKTEDSSSFLIDKTTTVQVPMMHQMEQYYHLVDMELNCTVLQMDYSKNALALFVLPKEGQMESVEAAMSSKTLKKWNRLLQKGWVDLFVPKFSISATYDLGATLLKMGIQHAYSENADFSGLTEDNGLKLSNAAHKAVLHIGEKGTEAAAVPEVELSDQPENTFLHPIIQIDRSFMLLILERSTRSILFLGKVVNPTEA

SEQ ID NO: 896 - protein, 546 aa, Homo Sapiens
MNCCIGLGEKARGSHRASYPSLSALFTEASILGFGSFAVKAQVGNQQLGGPEWIRFSLTPRPLNCSLSLTPRGQRWVRVGCYISVETLWIRFVGTEDAWVRGTGCTRLLEAPHRGATGRGSRGGGGVACPRPSRLFFASAGVRGVALAARAMPGRSCVALVLLAAAVSCAVAQHAPPWTEDCRKSTYPPSGPTYRGAVPWYTINLDLPPYKRWHELMLDKAPMLKVIVNSLKNMINTFVPSGKVMQVVDEKLPGLLGNFPGPFEEEMKGIAAVTDIPLGEIISFNIFYELFTICTSIVAEDKKGHLIHGRNMDFGVFLGWNINNDTWVITEQLKPLTVNLDFQRNNKTVFKASSFAGYVGMLTGFKPGLFSLTLNERFSINGGYLGILEWILGKKDAMWIGFLTRTVLENSTSYEEAKNLLTKTKILAPAYFILGGNQSGEGCVITRDRKESLDVYELDAKQGRWYVVQTNYDRWKHPFFLDDRRTPAKMCLNRTSQENISFETMYDVLSTKPVLNKLTVYTTLIDVTKGQFETYLRDCPDPCIGW

SEQ ID NO: 897 - protein, 825 aa, Homo Sapiens
MNLQPIFWIGLISSVCCVFAQTDENRCLKANAKSCGECIQAGPNCGWCTNSTFLQEGMPTSARCDDLEALKKKGCPPDDIENPRGSKDIKKNKNVTNRSKGTAEKLKPEDITQIQPQQLVLRLRSGEPQTFTLKFKRAEDYPIDLYYLMDLSYSMKDDLENVKSLGTDLMNEMRRITSDFRIGFGSFVEKTVMPYISTTPAKLRNPCTSEQNCTSPFSYKNVLSLTNKGEVFNELVGKQRISGNLDSPEGGFDAIMQVAVCGSLIGWRNVTRLLVFSTDAGFHFAGDGKLGGIVLPNDGQCHLENNMYTMSHYYDYPSIAHLVQKLSENNIQTIFAVTEEFQPVYKELKNLIPKSAVGTLSANSSNVIQLIIDAYNSLSSEVILENGKLSEGVTISYKSYCKNGVNGTGENGRKCSNISIGDEVQFEISITSNKCPKKDSDSFKIRPLGFTEEVEVILQYICECECQSEGIPESPKCHEGNGTFECGACRCNEGRVGRHCECSTDEVNSEDMDAYCRKENSSEICSNNGECVCGQCVCRKRDNTNEIYSGKFCECDNFNCDRSNGLICGGNGVCKCRVCECNPNYTGSACDCSLDTSTCEASNGQICNGRGICECGVCKCTDPKFQGQTCEMCQTCLGVCAEHKECVQCRAFNKGEKKDTCTQECSYFNITKVESRDKLPQPVQPDPVSHCKEKDVDDCWFYFTYSVNGNNEVMVHVVENPECPTGPDIIPIVAGVVAGIVLIGLALLLIWKLLMIIHDRREFAKFEKEKMNAKWDTSLSVAQPGVQWCDISSLQPLTSRFQQFSCLSLPSTWDYRVKILFIRVP

SEQ ID NO: 898 - protein, 352 aa, Homo Sapiens
MRSLGALLLLLSACLAVSAGPVPTPPDNIQVQENFNISRIYGKWYNLAIGSTCPWLKKIMDRMTVSTLVLGEGATEAEISMTSTRWRKGVCEETSGAYEKTDTDGKFLYHKSKWNITMESYVVHTNYDEYAIFLTKKFSRHHGPTITAKLYGRAPQLRETLLQDFRVVAQGVGIPEDSIFTMADRGECVPGEQEPEPILIPRVRRAVLPQEEEGSGGGQLVTEVTKKEDSCQLGYSAGPCMGMTSRYFYNGTSMACETFQYGGCMGNGNNFVTEKECLQTCRTVAACNLPIVRGPCRAFIQLWAFDAVKGKCVLFPYGGCQGNGNKFYSEKECREYCGVPGDGDEELLRFSN

SEQ ID NO: 899 - protein, 2215 aa, Homo Sapiens
MVILQQGDHVWMDLRLGQEFDVPIGAVVKLCDSGQVQVVDDEDNEHWISPQNATHIKPMHPTSVHGVEDMIRLGDLNEAGILRNLLIRYRDHLIYTYTGSILVAVNPYQLLSIYSPEHIRQYTNKKIGEMPPHIFAIADNCYFNMKRNSRDQCCIISGESGAGKTESTKLILQFLAAISGQHSWIEQQVLEATPILEAFGNAKTIRNDNSSRFGKYIDIHFNKRGAIEGAKIEQYLLEKSRVCRQALDERNYHVFYCMLEGMSEDQKKKLGLGQASDYNYLAMGNCITCEGRVDSQEYANIRSAMKVLMFTDTENWEISKLLAAILHLGNLQYEARTFENLDACEVLFSPSLATAASLLEVNPPDLMSCLTSRTLITRGETVSTPLSREQALDVRDAFVKGIYGRLFVWIVDKINAAIYKPPSQDVKNSRRSIGLLDIFGFENFAVNSFEQLCINFANEHLQQFFVRHVFKLEQEEYDLESIDWLHIEFTDNQDALDMIANKPMNIISLIDEESKFPKGTDTTMLHKLNSQHKLNANYIPPKNNHETQFGINHFAGIVYYETQGFLEKNRDTLHGDIIQLVHSSRNKFIKQIFQADVAMGAETRKRSPTLSSQFKRSLELLMRTLGACQPFFVRCIKPNEFKKPMLFDRHLCVRQLRYSGMMETIRIRRAGYPIRYSFVEFVERYRVLLPGVKPAYKQGDLRGTCQRMAEAVLGTHDDWQIGKTKIFLKDHHDMLLEVERDKAITDRVILLQKVIRGFKDRSNFLKLKNAATLIQRHWRGHNCRKNYGLMRLGFLRLQALHRSRKLHQQYRLARQRIIQFQARCRAYLVRKAFRHRLWAVLTVQAYARGMIARRLHQRLRAEYLWRLEAEKMRLAEEEKLRKEMSAKKAKEEAERKHQERLAQLAREDAERELKEKEAARRKKELLEQMERARHEPVNHSDMVDKMFGFLGTSGGLPGQEGQAPSGFEDLERGRREMVEEDLDAALPLPDEDEEDLSEYKFAKFAATYFQGTTTHSYTRRPLKQPLLYHDDEGDQLAALAVWITILRFMGDLPEPKYHTAMSDGSEKIPVMTKIYETLGKKTYKRELQALQGEGEAQLPEGQKKSSVRHKLVHLTLKKKSKLTEEVTKRLHDGESTVQGNSMLEDRPTSNLEKLHFIIGNGILRPALRDEIYCQISKQLTHNPSKSSYARGWILVSLCVGCFAPSEKFVKYLRNFIHGGPPGYAPYCEERLRRTFVNGTRTQPPSWLELQATKSKKPIMLPVTFMDGTTKTLLTDSATTAKELCNALADKISLKDRFGFSLYIALFDKVSSLGSGSDHVMDAISQCEQYAKEQGAQERNAPWRLFFRKEVFTPWHSPSEDNVATNLIYQQVVRGVKFGEYRCEKEDDLAELASQQYFVDYGSEMILERLLNLVPTYIPDREITPLKTLEKWAQLAIAAHKKGIYAQRRTDAQKVKEDVVSYARFKWPLLFSRFYEAYKFSGPSLPKNDVIVAVNWTGVYFVDEQEQVLLELSFPEIMAVSSSRECRVWLSLGCSDLGCAAPHSGWAGLTPAGPCSPCWSCRGAKTTAPSFTLATIKGDEYTFTSSNAEDIRDLVVTFLEGLRKRSKYVVALQDNPNPAGEESGFLSFAKGDLIILDHDTGEQVMNSGWANGINERTKQRGDFPTDCVYVMPTVTMPPREIVALVTMTPDQRQDVVRLLQLRTAEPEVRAKPYTLEEFSYDYFRPPPKHTLSRVMVSKARGKDRLWSHTREPLKQALLKKLLGSEELSQEACLAFIAVLKYMGDYPSKRTRSVNELTDQIFEGPLKAEPLKDEAYVQILKQLTDNHIRYSEERGWELLWLCTGLFPPSNILLPHVQRFLQSRKHCPLAIDCLQRLQKALRNGSRKYPPHLVEVEAIQHKTTQIFHKVYFPDDTDEAFEVESSTKAKDFCQNIATRLLLKSSEGFSLFVKIADKVISVPENDFFFDFVRHLTDWIKKARPIKDGIVPSLTYQVFFMKKLWTTTVPGKDPMADSIFHYYQELPKYLRGYHKCTREEVLQLGALIYRVKFEEDKSYFPSIPKLLRELVPQDLIRQVSPDDWKRSIVAYFNKHAGKSKEEAKLAFLKLIFKWPTFGSAFFEVKQTTEPNFPEILLIAINKYGVSLIDPKTKDILTTHPFTKISNWSSGNTYFHITIGNLVRGSKLLCETSLGYKMDDLLTSYISQMLTAMSKQRGSRSGK

SEQ ID NO: 900 - protein, 294 aa, Homo Sapiens
MAEGERQPPPDSSEEAPPATQNFIIPKKEIHTVPDMGKWKRSQAIEKLVALLNTLDRWIDETPPVDQPSRFGNKAYRTWYAKLDEEAENLVATVVPTHLAAAVPEVAVYLKESVGNSTRIDYGTGHEAAFAAFLCCLCKIGVLRVDDQIAIVFKVFNRYLEVMRKLQKTYRMEPAGSQGVWGLDDFQFLPFIWGSSQLIDHPYLEPRHFVDEKAVNENHKDYMFLECILFITEMKTGPFAEHSNQLWNISAVPSWSKVNQGLIRMYKAECLEKFPVIQHFKFGSLLPIHPVTSG

SEQ ID NO: 901 - protein, 200 aa, Homo Sapiens
MANIAVQRIKREFKEVLKSEETSKNQIKVDLVDENFTELRGEIAGPPDTPYEGGRYQLEIKIPETYPFNPPKVRFITKIWHPNISSVTGAICLDILKDQWAAAMTLRTVLLSLQALLAAAEPDDPQDAVVANQYKQNPEMFKQTARLWAHVYAGAPVSSPEYTKKIENLCAMGFDRNAVIVALSSKSWDVETATELLLSN

SEQ ID NO: 902 - protein, 403 aa, Homo Sapiens
MSGRVGDLSPRQKEALAKFRENVQDVLPALPNPDDYFLLRWLRARSFDLQKSEAMLRKHVEFRKQKDIDNIISWQPPEVIQQYLSGGMCGYDLDGCPVWYDIIGPLDAKGLLFSASKQDLLRTKMRECELLLQECAHQTTKLGRKVETITIIYDCEGLGLKHLWKPAVEAYGEFLCMFEENYPETLKRLFVVKAPKLFPVAYNLIKPFLSEDTRKKIMVLGANWKEVLLKHISPDQVPVEYGGTMTDPDGNPKCKSKINYGGDIPRKYYVRDQVKQQYEHSVQISRGSSHQVEYEILFPGCVLRWQFMSDGADVGFGIFLKTKMGERQRAGEMTEVLPNQRYNSHLVPEDGTLTCSDPGIYVLRFDNTYSFIHAKKVNFTVEVLLPDKASEEKMKQLGAGTPK

SEQ ID NO: 903 - protein, 145 aa, Homo Sapiens [sequence omitted]

SEQ ID NO: 904 - protein, 300 aa, Homo Sapiens
MKFLLDILLLLPLLIVCSLESFVKLFIPKRRKSVTGEIVLITGAGHGIGRLTAYEFAKLKSKLVLWDINKHGLEETAAKCKGLGAKVHTFVVDCSNREDIYSSAKKVKAEIGDVSILVNNAGVVYTSDLFATQDPQIEKTFEVNVLAHFWTTKAFLPAMTKNNHGHIVTVASAAGHVSVPFLLAYCSSKFAAVGFHKTLTDELAALQITGVKTTCLCPNFVNTGFIKNPSTSLGPTLEPEEVVNRLMHGILTEQKMIFIPSSIAFLTTLERILPERFLAVLKQKISVKFDAVIGYKMKAQ

SEQ ID NO: 905 - protein, 620 aa, Homo Sapiens
MLSAIYTVLAGLLFLPLLVNLCCPYFFQDIGYFLKVAAVGRRVRSYGKRRPARTILRAFLEKARQTPHKPFLLFRDETLTYAQVDRRSNQVARALHDHLGLRQGDCVALLMGNEPAYVWLWLGLVKLGCAMACLNYNIRAKSLLHCFQCCGAKVLLVSPELQAAVEEILPSLKKDDVSIYYVSRTSNTDGIDSFLDKVDEVSTEPIPESWRSEVTFSTPALYIYTSGTTGLPKAAMITHQRIWYGTGLTFVSGLKADDVIYITLPFYHSAALLIGIHGCIVAGATLALRTKFSASQFWDDCRKYNVTVIQYIGELLRYLCNSPQKPNDRDHKVRLALGNGLRGDVWRQFVKRFGDICIYEFYAATEGNIGFMNYARKVGAVGRVNYLQKKIITYDLIKYDVEKDEPVRDENGYCVRVPKGEVGLLVCKITQLTPFNGYAGAKAQTEKKKLRDVFKKGDLYFNSGDLLMVDHENFIYFHDRVGDTFRWKGENVATTEVADTVGLVDFVQEVNVYGVHVPDHEGRIGMASIKMKENHEFDGKKLFQHIADYLPSYARPRFLRIQDTIEITGTFKHRKMTLVEEGFNPAVIKDALYFLDDTAKMYVPMTEDIYNAISAKTLKL

SEQ ID NO: 906 - protein, 289 aa, Homo Sapiens [sequence omitted]

SEQ ID NO: 907 - protein, 375 aa, Homo Sapiens
MEEEIAALVIDNGSGMCKAGFAGDDAPRAVFPSIVGRPRHQGVMVGMGQKDSYVGDEAQSKRGILTLKYPIEHGIVTNWDDMEKIWHHTFYNELRVAPEEHPVLLTEAPLNPKANREKMTQIMFETFNTPAMYVAIQAVLSLYASGRTTGIVMDSGDGVTHTVPIYEGYALPHAILRLDLAGRDLTDYLMKILTERGYSFTTTAEREIVRDIKEKLCYVALDFEQEMATAASSSSLEKSYELPDGQVITIGNERFRCPEALFQPSFLGMESCGIHETTFNSIMKCDVDIRKDLYANTVLSGGTTMYPGIADRMQKEITALAPSTMKIKIIAPPERKYSVWIGGSILASLSTFQQMWISKQEYDESGPSIVHRKCF

SEQ ID NO: 908 - protein, 389 aa, Homo Sapiens
MKNNQITNNQRIKAAVPSIKFCLDNGAKSVVLMSHLGRPDGVPMPDKYSLEPVAVELKSLLGKDVLFLKDCVGPEVEKACANPAAGSVILLENLRFHVEEEGKGKDASGNKVKAEPAKIEAFRASLSKLGDVYVNDAFGTAHRAHSSMVGVNLPQKAGGFLMKKELNYFAKALESPERPFLAILGGAKVADKIQLINNMLDKVNEMIIGGGMAFTFLKVLNNMEIGTSLFDEEGAKIVKDLMSKAEKNGVKITLPVDFVTADKFDENAKTGQATVASGIPAGWMGLDCGPESSKKYAEAVTRAKQIVWNGPVGVFEWEAFARGTKALMDEVVKATSRGCITIIGGGDTATCCAKWNTEDKVSHVSTGGGASLELLEGKVLPGVDALSNI

SEQ ID NO: 909 - protein, 323 aa, Homo Sapiens
MDSKYQCVKLNDGHFMPVLGFGTYAPAEVPKSKALEAVKLAIEAGFHHIDSAHVYNNEEQVGLAIRSKIADGSVKREDIFYTSKLWSNSHRPELVRPALERSLKNLQLDYVDLYLIHFPVSVKPGEEVIPKDENGKILFDTVDLCATWEAMEKCKDAGLAKSIGVSNFNHRLLEMILNKPGLKYKPVCNQVECHPYFNQRKLLDFCKSKDIVLVAYSALGSHREEPWVDPNSPVLLEDPVLCALAKKHKRTPALIALRYQLQRGVVVLAKSYNEQRIRQNVQVFEFQLTSEEMKAIDGLNRNVRYLTLDIFAGPPNYPFSDEY

SEQ ID NO: 910 - protein, 261 aa, Homo Sapiens
MAAACRSVKGLVAVITGGASGLGLATAERLVGQGASAVLLDLPNSGGEAQAKKLGNNCVFAPADVTSEKDVQTALALAKGKFGRVDVAVNCAGIAVASKTYNLKKGQTHTLEDFQRVLDVNLMGTFNVIRLVAGEMGQNEPDQGGQRGVIINTASVAAFEGQVGQAAYSASKGGIVGMTLPIARDLAPIGIRVMTIAPGLFGTPLLTSLPEKVCNFLASQVPFPSRLGDPAEYAHLVQAIIENPFLNGEVIRLDGAIRMQP

SEQ ID NO: 911 - protein, 645 aa, Homo Sapiens
MSCQISCKSRGRGGGGGGFRGFSSGSAVVSGGSRRSTSSFSCLSRHGGGGGGFGGGGFGSRSLVGLGGTKSISISVAGGGGGFGAAGGFGGRGGGFGGGSGFGGGSGFGGGSGFSGGGFGGGGFGGGRFGGFGGPGGVGGLGGPGGFGPGGYPGGIHEVSVNQSLLQPLNVKVDPEIQNVKAQEREQIKTLNNKFASFIDKVRFLEQQNQVLQTKWELLQQMNVGTRPINLEPIFQGYIDSLKRYLDGLTAERTSQNSELNNMQDLVEDYKKKYEDEINKRTAAENDFVTLKKDVDNAYMIKVELQSKVDLLNQEIEFLKVLYDAEISQIHQSVTDTNVILSMDNSRNLDLDSIIAEVKAQYEEIAQRSKEEAEALYHSKYEELQVTVGRHGDSLKEIKIEISELNRVIQRLQGEIAHVKKQCKNVQDAIADAEQRGEHALKDARNKLNDLEEALQQAKEDLARLLRDYQELMNVKLALDVEIATYRKLLEGEECRMSGDLSSNVTVSVTSSTISSNVASKAAFGGSGGRGSSSGGGYSSGSSSYGSGGRQSGSRGGSGGGGSISGGGYGSGGGSGGRYGSGGGSKGGSISGGGYGSGGGKHSSGGGSRGGSSSGGGYGSGGGGSSSVKGSSGEAFGSSVTFSFR

SEQ ID NO: 912 - protein, 261 aa, Homo Sapiens
MAAAVPRAAFLSPLLPLLLGFLLLSAPHGGSGLHTKGALPLDTVTFYKVIPKSKFVLVKFDTQYPYGEKQDEFKRLAENSASSDDLLVAEVGISDYGDKLNMELSEKYKLDKESYPVFYLFRDGDFENPVPYTGAVKVGAIQRWLKGQGVYLGMPGCLPVYDALAGEFIRASGVEARQALLKQGQDNLSSVKETQKKWAEQYLKIMGKILDQGEDFPASEMTRIARLIEKNKMSDGKKEELQKSLNILTAFQKKGAEKEEL

SEQ ID NO: 913 - protein, 201 aa, Homo Sapiens
MEYLIGIQGPDYVLVASDRVAASNIVQMKDDHDKMFKMSEKILLLCVGEAGDTVQFAEYIQKNVQLYKMRNGYELSPTAAANFTRRNLADCLRSRTPYHVNLLLAGYDEHEGPALYYMDYLAALAKAPFAAHGYGAFLTLSILDRYYTPTISRERAVELLRKCLEELQKRFILNLPTFSVRIIDKNGIHDLDNISFPKQGS

SEQ ID NO: 914 - protein, 323 aa, Homo Sapiens
MDSKYQCVKLNDGHFMPVLGFGTYAPAEVPKSKALEATKLAIEAGFRHIDSAHLYNNEEQVGLAIRSKIADGSVKREDIFYTSKLWCNSHRPELVRPALERSLKNLQLDYVDLYLIHFPVSVKPGEEVIPKDENGKILFDTVDLCATWEAVEKCKDAGLAKSIGVSNFNRRQLEMILNKPGLKYKPVCNQVECHPYFNQRKLLDFCKSKDIVLVAYSALGSHREEPWVDPNSPVLLEDPVLCALAKKHKRTPALIALRYQLQRGVVVLAKSYNEQRIRQNVQVFEFQLTSEEMKAIDGLNRNVRYLTLDIFAGPPNYPFSDEY

SEQ ID NO: 915 - protein, 327 aa, Homo Sapiens
MVKTWAEKEMRNLIRLNTAEIPCPEPIMLRSHVLVMSFIGKDDMPAPLLKNVQLSESKARELYLQVIQYMRRMYQDARLVHADLSEFNMLYHGGGVYIIDVSQSVEHDHPHALEFLRKDCANVNDFFMRHSVAVMTVRELFEFVTDPSITHENMDAYLSKAMEIASQRTKEERSSQDHVDEEVFKRAYIPRTLNEVKNYERDMDIIMKLKEEDMAMNAQQDNILYQTVTGLKKDLSGVQKVPALLENQVEERTCSDSEDIGSSECSDTDSEEQGDHARPKKHTTDPDIDKKERKKMVKEAQREKRKNKIPKHVKKRKEKTAKTKKGK

SEQ ID NO: 916 - protein, 290 aa, Homo Sapiens
MSNKEGSGGFRKRKHDNFPHNQRREGKDVNSSSPVMLAFKSFQQELDARHDKYERLVKLSRDITVESKRTIFLLHRITSAPDMEDILTESEIKLDGVRQKIFQVAQELSGEDMHQFHRAITTGLQEYVEAVSFQHFIKTRSLISMDEINKQLIFTTEDNGKENKTPSSDAQDKQFGTWRLRVTPVDYLLGVADLTGELMRMCINSVGNGDIDTPFEVSQFLRQVYDGFSFIGNTGPYEVSKKLYTLKQSLAKVENACYALKVRGSEIPKHMLADVFSVKTEMIDQEEGIS

SEQ ID NO: 917 - protein, 535 aa, Homo Sapiens
MASLSLAPVNIFKAGADEERAETARLTSFIGAIAIGDLVKSTLGPKGMDKILLSSGRDASLMVTNDGATILKNIGVDNPAAKVLVDMSRVQDDEVGDGTTSVTVLAAELLREAESLIAKKIHPQTIIAGWREATKAAREALLSSAVDHGSDEVKFRQDLMNIAGTTLSSKLLTHHKDHFTKLAVEAVLRLKGSGNLEAIHIIKKLGGSLADSYLDEGFLLDKKIGVNQPKRIENAKILIANTGMDTDKIKIFGSRVRVDSTAKVAEIEHAEKEKMKEKVERILKHGINCFINRQLIYNYPEQLFGAAGVMAIEHADFAGVERLALVTGGEIASTFDHPELVKLGSCKLIEEVMIGEDKLIHFSGVALGEACTIVLRGATQQILDEAERSLHDALCVLAQTVKDSRTVYGGGCSEMLMAHAVTQLANRTPGKEAVAMESYAKALRMLPTIIADNAGYDSADLVAQLRAAHSEGNTTAGLDMREGTIGDMAILGITESFQVKRQVLLSAAEAAEVILRVDNIIKAAPRKRVPDHHPC

SEQ ID NO: 918 - protein, 190 aa, Homo Sapiens
MAFIAKSFYDLSAISLDGEKVDFNTFRGRAVLIENVASLCGTTTRDFTQLNELQCRFPRRLVVLGFPCNQFGHQENCQNEEILNSLKYVRPGGGYQPTFTLVQKCEVNGQNEHPVFAYLKDKLPYPYDDPFSLMTDPKLIIWSPVRRSDVAWNFEKFLIGPEGEPFRRYSRTFPTINIEPDIKRLLKVAI

SEQ ID NO: 919 - protein, 1049 aa, Homo Sapiens
MKEENVKTVLMNPNIASVQTNEVGLKQADTVYFLPITPQFVTEVIKAEQPDGLILGMGGQTALNCGVELFKRGVLKEYGVKVLGTSVESIMATEDRQLFSDKLNEINEKIAPSFAVESIEDALKAADTIGYPVMIRSAYALGGLGSGICPNRETLMDLSTKAFAMTNQILVEKSVTGWKEIEYEVVRDADDNCVTVCNMENVDAMGVHTGDSVVVAPAQTLSNAEFQMLRRTSINVVRHLGIVGECNIQFALHPTSMEYCIIEVNARLSRSSALASKATGYPLAFIAAKIALGIPLPEIKNVVSGKTSACFEPSLDYMVTKIPRWDLDRFHGTSSRIGSSMKSVGEVMAIGRTFEESFQKALRMCHPSIEGFTPRLPMNKEWPSNLDLRKELSEPSSTRIYAIAKAIDDNMSLDEIEKLTYIDKWFLYKMRDILNMEKTLKGLNSESMTEETLKRAKEIGFSDKQISKCLGLTEAQTRELRLKKNIHPWVKQIDTLAAEYPSVTNYLYVTYNGQEHDVNFDDHGMMVLGCGPYHIGSSVEFDWCAVSSIRTLRQLGKKTVVVNCNPETVSTDFDECDKLYFEELSLERILDIYHQEACGGCIISVGGQIPNNLAVPLYKNGVKIMGTSPLQIDRAEDRSIFSAVLDELKVAQAPWKAVNTLNEALEFAKSVDYPCLLRPSYVLSGSAMNVVFSEDEMKKFLEEATRVSQEHPVVLTKFVEGAREVEMDAVGKDGRVISHAISEHVEDAGVHSGDATLMLPTQTISQGAIEKVKDATRKIAKAFAISGPFNVQFLVKGNDVLVIECNLRASRSFPFVSKTLGVDFIDVATKVMIGENVDEKHLPTLDHPIIPADYVAIKAPMFSWPRLRDADPILRCEMASTGEVACFGEGIHTAFLKAMLSTGFKIPQKGILIGIQQSFRPRFLGVAEQLHNEGFKLFATEATSDWLNANNVPATPVAWPSQEGQNPSLSSIRKLIRDGSIDLVINLPNNNTKFVHDNYVIRRTAVDSGIPLLTNFQVTKLFAEAVQKSRKVDSKSLFHYRQYSAGKAA

SEQ ID NO: 920 - protein, 434 aa, Homo Sapiens
MSILKIHAREIFDSRGNPTVEVDLFTSKGLFRAAVPSGASTGIYEALELRDNDKTRYMGKGVSKAVEHINKTIAPALVSKKLNVTEQEKIDKLMIEMDGTENKSKFGANAILGVSLAVCKAGAVEKGVPLYRHIADLAGNSEVILPVPAFNVINGGSHAGNKLAMQEFMILPVGAANFREAMRIGAEVYHNLKNVIKEKYGKDATNVGDEGGFAPNILENKEGLELLKTAIGKAGYTDKVVIGMDVAASEFFRSGKYDLDFKSPDDPSRYISPDQLADLYKSFIKDYPVVSIEDPFDQDDWGAWQKFTASAGIQVVGDDLTVTNPKRIAKAVNEKSCNCLLLKVNQIGSVTESLQACKLAQANGWGVMVSHRSGETEDTFIADLVVGLCTGQIKTGAPCRSERLAKYNQLLRIEEELGSKAKFAGRNFRNPLAK

SEQ ID NO: 921 - protein, 248 aa, Homo Sapiens
  misc_feature (1)..(1): Xaa can be any naturally occurring amino acid
XSKYQCVKLNDGHFMPVLGFGTYAPAEVGLAIRSKIADGSVKREDIFYTSKLWCNSHRPELVRPALERSLKNLQLDYVDLYLIHFPVSVKPGEEVIPKDENGKILFDTVDLCATWEAVEKCKDAGLAKSIGVSNFNRRQLEMILNKPGLKYKPVCNQVECHPYFNQRKLLDFCKSKDIVLVAYSALGSHREEPWVDPNSPVLLEDPVLCALAKKHKRTPALIALRYQLQRGVVVLAKSYNEQRIRQNV

SEQ ID NO: 922 - protein, 566 aa, Homo Sapiens
MWLRAFILATLSASAAWGHPSSPPVVDTVHGKVLGKFVSLEGFAQPVAIFLGIPFAKPPLGPLRFTPPQPAEPWSFVKNATSYPPMCTQDPKAGQLLSELFTNRKENIPLKLSEDCLYLNIYTPADLTKKNRLPVMVWIHGGGLMVGAASTYDGLALAAHENVVVVTIQYRLGIWGFFSTGDEHSRGNWGHLDQVAALRWVQDNIASFGGNPGSVTIFGESAGGESVSVLVLSPLAKNLFHRAISESGVALTSVLVKKGDVKPLAEQIAITAGCKTTTSAVMVHCLRQKTEEELLETTLKMKFLSLDLQGDPRESQPLLGTVIDGMLLLKTPEELQAERNFHTVPYMVGINKQEFGWLIPMLMSYPLSEGQLDQKTAMSLLWKSYPLVCIAKELIPEATEKYLGGTDDTVKKKDLFLDLIADVMFGVPSVIVARNHRDAGAPTYMYEFQYRPSFSSDMKPKTVIGDHGDELFSVFGAPFLKEGASEEEIRLSKMVMKFWANFARNGNPNGEGLPHWPEYNQKEGYLQIGANTQAAQKLKDKEVAFWTNLFAKKAVEKPPQTEHIEL

SEQ ID NO: 923 - protein, 434 aa, Homo Sapiens
MSNPFAHLAEPLDPVQPGKKFFNLNKLEDSRYGRLPFSIRVLLEAAIRNCDEFLVKKQDIENILHWNVTQHKNIEVPFKPARVILQDFTGVPAVVDFAAMRDAVKKLGGDPEKINPVCPADLVIDHSIQVDFNRRADSLQKNQDLEFERNRERFEFLKWGSQAFHNMRIIPPGSGIIHQVNLEYLARVVFDQDGYYYPDSLVGTDSHTTMIDGLGILGWGVGGIEAEAVMLGQPISMVLPQVIGYRLMGKPHPLVTSTDIVLTITKHLRQVGVVGKFVEFFGPGVAQLSIADRATIANMCPEYGATAAFFPVDEVSITYLVQTGRDEEKLKYIKKYLQAVGMFRDFNDPSQDPDFTQVVELDLKTVVPCCSGPKRPQDKVAVSDMKKDFESCLGAKQGFKGFQVAPEHHNDHKTFIYDNTEFTLAHGSVVIAAL

SEQ ID NO: 924 - protein, 215 aa, Homo Sapiens
MPEAAVKSTANKYQVFFFGTHETAFLGPKDLFPYEESKEKFGKPNKRKGFSEGLWEIENNPTVKASGYQPVLSLLQSSQKKSCVEEPEPEPEAAEGDGDKKGNAEGSSDEEGKLVIDEPAKEKNEKGALKRRAGDLLEDSPKRPKEAENPEGEEKEAATLEVERPLPMEVEKNSTPSEPGSGRGPPQEEEEEEDEEEEATKEDAEAPGIRDHESL

SEQ ID NO: 925 - protein, 135 aa, Homo Sapiens
MATKAESNGPVKVWGSIKGLTEGLHGFHVHEFGDNTAGCTSAGPHFNPLSRKHGGPKDEERHVGDLGNVTADKDGVADVSIEDSVISLSGDHCIIGRTLVVHEKADDLGKGGNEESTKTGNAGSRLACGVIGIAQ

SEQ ID NO: 926 - protein, 260 aa, Homo Sapiens
MEEMRDPSKIKWGDAGAEYVVESTGVFTTMEKAGAHLQGGAKRVIISAPSADAPMFVMGVNHEKYDNSLKIISNASCTTNCLAPLAKVIHDNFGIVEGLMTTVHAITATQKTVDGPSGKLWRDGRGALQNIIPASTGAAKAVGKVIPELNGKLTGMAFRVPTANVSVVDLTCRLEKPAKYDDIKKVVKQASEGPLKGILGYTEHQVVSSDFNSDTHSSTFDAGAGIALNDHFVKLISWYDNEFGYSNRVVDLMAHMASKE

SEQ ID NO: 927 - protein, 260 aa, Homo Sapiens; identical to SEQ ID NO: 926

SEQ ID NO: 928 - protein, 1020 aa, Homo Sapiens [sequence omitted]

SEQ ID NO: 929 - protein, 98 aa, Homo Sapiens
MAEQSDEAVKYYTLEEIQKHNHSKSTWLILHHKVYDLTKFLEEHPGGEEVLREQAGGDATENFEDVGHSTDAREMSKTFIIGELHPDDRPKLNKPPKP

SEQ ID NO: 930 - protein, 126 aa, Homo Sapiens
MDPKYQRVELNDGHFMPVLGFGTYAPPEVPRNRAVEVTKLAIEAGFRHIDSAYLYNNEEQVGLAIRSKIADGSVKREDIFYTSKLWCTFFQPQMVQPALESSLKKLQLDYVDLYLLHFPMALKSTT

SEQ ID NO: 931 - protein, 197 aa, Homo Sapiens
GFEWGGQRRASHNSTFSAYSRGVFRRDAHKSEVAHRFKDLGEENFKALVLIAFAQYLQQCPFEDHVKLVNEVTEFAKTCVADESAENCDKSLHTLFGDKLCTVATLRETYGEMADCCAKQEPERNECFLQHKDDNPNLPRLVRPEVDVMCTAFHDNEETFLKKYLYEIARRHPYFYAPELLFFAKRYKAAFTECCQA

SEQ ID NO: 932 - protein, 380 aa, Homo Sapiens
MGTKGKVIKCKAAIAWEAGKPLCIEEVEVAPPKAHEVRIQIIATSLCHTDATVIDSKFEGLAFPVIVGHEAAGIVESIGPGVTNVKPGDKVIPLYAPLCRKCKFCLSPLTNLCGKISNLKSPASDQQLMEDKTSRFTCKGKPVYHFFGTSTFSQYTVVSDINLAKIDDDANLERVCLLGCGFSTGYGAAINNAKVTPGSTCAVFGLGGVGLSAVMGCKAAGASRIIGIDINSEKFVKAKALGATDCLNPRDLHKPIQEVIIELTKGGVDFALDCAGGSETMKAALDCTTAGWGSCTFIGVAAGSKGLTIFPEELIIGRTINGTFFGGWKSVDSIPKLVTDYKNKKFNLDALVTHTLPFDKISEAFDLMNQGKSVRTILIF

SEQ ID NO: 933 - protein, 229 aa, Homo Sapiens [sequence omitted]

SEQ ID NO: 934 - protein, 392 aa, Homo Sapiens
MAALRQPQVAELLAEARRAFREEFGAEPELAVSAPGRVNLIGEHTDYNQGLVLPMALELMTVLVGSPRKDGLVSLLTTSEGADEPQRLQFPLPTAQRSLEPGTPRWANYVKGVIQYYPAAPLPGFSAVVVSSVPLGGGLSSSASLEVATYTFLQQLCPDSGTIAARAQVCQQAEHSFAGMPCGIMDQFISLMGQKGHALLIDCRSLETSLVPLSDPKLAVLITNSNVRHSLASSEYPVRRRQCEEVARALGKESLREVQLEELEAARDLVSKEGFRRARHVVGEIRRTAQAAAALRRGDYRAFGRLMVESHRSLRDDYEVSCPELDQLVEAALAVPGVYGSRMTGGGFGGCTVTLLEASAAPHAMRHIQEHYGGTATFYLSQAADGAKVLCL

SEQ ID NO: 935 - protein, 432 aa, Homo Sapiens
MVWIHGGGLMVGAASTYDGLALAAHENVVVVTIQYRLGIWGFFSTGDEHSRGNWGHLDQVAALRWVQDNIASFGGNPGSVTIFGESAGGESVSVLVLSPLAKNLFHRAISESGVALTSVLVKKGDVKPLAEQIAITAGCKTTTSAVMVHCLRQKTEEELLETTLKMKFLSLDLQGDPRESQPLLGTVIDGMLLLKTPEELQAERNFHTVPYMVGINKQEFGWLIPMQLMSYPLSEGQLDQKTAMSLLWKSYPLVCIAKELIPEATEKYLGGTDDTVKKKDLFLDLIADVMFGVPSVIVARNHRDAGAPTYMYEFQYRPSFSSDMKPKTVIGDHGDELFSVFGAPFLKEGASEEEIRLSKMVMKFWANFARNGNPNGEGLPHWPEYNQKEGYLQIGANTQAAQKLKDKEVAFWTNLFAKKAVEKPPQTEHIEL

SEQ ID NO: 936 - protein, 125 aa, Homo Sapiens
MDDDIAALVVDNGSGMCKAGFAGDDAPRAVFPSIVGRPRHQGVMVGMGQKDSYVGDEAQSKRGILTLKYPIEHGIVTNWDDMEKIWHHTFYNELRVAPEEHPVLLTEAPLNPKANREKMTQDSLL

SEQ ID NO: 937 - protein, 466 aa, Homo Sapiens
MQRLLTPVKRILQLTRAVQETSLTPARLLPVAHQRFSTASAVPLAKTDTWPKDVGILALEVYFPAQYVDQTDLEKYNNVEAGKYTVGLGQTRMGFCSVQEDINSLCLTVVQRLMERIQLPWDSVGRLEVGTETIIDKSKAVKTVLMELFQDSGNTDIEGIDTTNACYGGTASLFNAANWMESSSWDGLRGTHMENVYDFYKPNLASEYPIVDGKLSIQCYLRALDRCYTSYRKKIQNQWKQAGSDRPFTLDDLQYMIFHTPFCKMVQKSLARLMFNDFLSASSDTQTSLYKGLEAFGGLKLEDTYTNKDLDKALLKASQDMFDKKTKASLYLSTHNGNMYTSSLYGCLASLLSHHSAQELAGSRIGAFSYGSGLAASFFSFRVSQDAAPGSPLDKLVSSTSDLPKRLASRKCVSPEEFTEIMNQREQFYHKVNFSPPGDTNSLFPGTWYLERVDEQHRRKYARRPV

SEQ ID NO: 938 - protein, 176 aa, Homo Sapiens
MEYLIDHDKMFKMSEKILLLCVGEAGDTVQFAEYIQKNVQLYKMRNGYELSPTAAANFTRRNLADCLRSRTPYHVNLLLAGYDEHEGPALYYMDYLAALAKAPFAAHGYGAFLTLSILDRYYTPTISRERAVELLRKCLEELQKRFILNLPTFSVRIIDKNGIHDLDNISFPKQGS

SEQ ID NO: 939 - protein, 326 aa, Homo Sapiens
MSGLGKKHLLLMGEFFSYGTKILYQNTEALQSKFFSPLQKAMLPPNSFQGKVAFITGGGTGLGKGMTTLLSSLGAQCVIASRKMDVLKATAEQISSQTGNKVHAIQCDVRDPDMVQNTVSELIKVAGHPNIVINNAAGNFISPTERLSPNAWKTITDIVLNGTAFVTLEIGKQLIKAQKGAAFLSITTIYAETGSGFVVPSASAKAGVEAMSKSLAAEWGKYGMRFNVIQPGPIKTKGAFSRLDPTGTFEKEMIGRIPCGRLGTVEELANLAAFLCSDYASWINGAVIKFDGGEEVLISGEFNDLRKVTKEQWDTIEELIRKTKGS

SEQ ID NO: 940 - protein, 102 aa, Homo Sapiens
MNSVVSLLLILEPDKQEALIESLCEKLVKFREGERPSLRLQLLSNLFHGMDKNTPVRYTVYCSLIKVAASCGAIQYIPTELDQVRKWISDWNLTTEKKHTLL

SEQ ID NO: 941 - protein, 487 aa, Homo Sapiens
MAEYTRLHNALALIRLRNPPVNAISTTLLRDIKEGLQKAVIDHTIKAIVICGAEGKFSAGADIRGFSAPRTFGLTLGHVVDEIQRNEKPVVAAIQGMAFGGGLELALGCHYRIAHAEAQVGLPEVTLGLLPGARGTQLLPRLTGVPAALDLITSGRRILADEALKLGILDKVVNSDPVEEAIRFAQRVSDQPLESRRLCNKPIQSLPNMDSIFSEALLKMRRQHPGCLAQEACVRAVQAAVQYPYEVGIKKEEELFLYLLQSGQARALQYAFFAERKANKWSTPSGASWKTASARPVSSVGVVGLGTMGRGIVISFARARIPVIAVDSDKNQLATANKMITSVLEKEASKMQQSGHPWSGPKPRLTSSVKELGGVDLVIEAVFEEMSLKKQVFAELSAVCKPEAFLCTNTSALDVDEIASSTDRPHLVIGTHFFSPAHVMKLLEVIPSQYSSPTTIATVMNLSKKIKKIGVVVGNYSVSKKKKKKKK

SEQ ID NO: 942 - protein, 335 aa, Homo Sapiens
MVAVGICHTDDHVVSGNLVTPLPVILGHEAAGIVESVGEGVTTVKPGDKVIPLFTPQCGKCRVCKNPESNYCLKNDLGNPRGTLQDGTRRFTCRGKPIHHFLGTSTFSQYTVVDENAVAKIDAASPLEKVCLIGCGFSTGYGSAVNVAKVTPGSTCAVFGLGGVGLSAVMGCKAAGAARIIAVDINKDKFAKAKELGATECINPQDYKKPIQEVLKEMTDGGVDFSFEVIGRLDTMMASLLCCHEACGTSVIVGVPPASQNLSINPMLLLTGRTWKGAVYGGFKSKEGIPKLVADFMAKKFSLDALITHVLPFEKINEGFDLLHSGKSIRTVLTF

SEQ ID NO: 943 - protein, 750 aa, Homo Sapiens
MSLGKAYGVESHVLSPAETKTLYPLMNVDDLYGTLYVPHDGTMDPAGTCTTLARAASARGAQVIENCPVTGIRVWTDDFGVRRVAGVETQHGSIQTPCVVNCAGVWASAVGRMAGVKVPLVAMHHAYVVTERIEGIQNMPNVRDHDASVYLRLQGDALSVGGYEANPIFWEEVSDKFAFGLFDLDWEVFTQHIEGAINRVPVLEKTGIKSTVCGPESFTPDHKPLMGEAPELRGFFLGCGFNSAGMMLGGGCGQELAHWIIHGRPEKDMHGYDIRRFHHSLTDHPRWIRERSHESYAKNYSVVFPHDEPLAGRNMRRDPLHEELLGQGCVFQERHGWERPGWFHPRGPAPVLEYDYYGAYGSRAHEDYAYRRLLADEYTFAFPPHHDTIKKECLACRGAAAVFDMSYFGKFYLVGLDARKAADWLFSADVSRPPGSTVYTCMLNHRGGTESDLTVSRLAPSHQASPLAPAFEGDGYYLAMGGAVAQHNWSHITTVLQDQKSQCQLIDSSEDLGMISIQGPASRAILQEVLDADLSNEAFPFSTHKLLRAAGHLVRAMRLSFVGELGWELHIPKASCVPVYRAVMAAGAKHGLINAGYRAIDSLSIEKGYRHWHADLRPDDSPLEAGLAFTCKLKSPVPFLGREALEQQRAAGLRRRLVCFTMEDKVPMFGLEAIWRNGQVVGHVRRADFGFAIDKTIAYGYIHDPSGGPVSLDFVKSGDYALERMGVTYGAQAHLKSPFDPNNKRVKGIY

SEQ ID NO: 944 - protein, 480 aa, Homo Sapiens
MRLRRLALFPGVALLLAAARLAAASEFFAPWCGHCKRLAPEYEAAATRLKGIVPLAKVDCTANTNTCNKYGVSGYPTLKIFRDGEEAGAYDGPRTADGIVSHLKKQAGPASVPLRTEEEFKKFISDKDASIVGFFDDSFSEAHSEFLKAASNLRDNYRFAHTNVESLVNEYDDNGEGIILFRPSHLTNKFEDKTVAYTEQKMTSGKIKKFIQENIFGICPHMTEDNKDLIQGKDLLIAYYDVDYEKNAKGSNYWRNRVMMVAKKFLDAGHKLNFAVASRKTFSHELSDFGLESTAGEIPVVAIRTAKGEKFVMQEEFSRDGKALERFLQDYFDGNLKRYLKSEPIPESNDGPVKVVVAENFDEIVNNENKDVLIEFYAPWCGHCKNLEPKYKELGEKLSKDPNIVIAKMDATANDVPSPYEVRGFPTIYFSPANKKLNPKKYEGGRELSDFISYLQREATNPPVIQEEKPKKKKKAQEDL

SEQ ID NO: 945 - protein, 330 aa, Homo Sapiens
MGIEVDPEYGGTGASFLSTVLVIEELAKVDASVAVFCEIQNTLINTLIRKHGTEEQKATYLPQLTTEKVGSFCLSEAGAGSDSFALKTRADKEGDYYVLNGSKMWISSAEHAGLFLVMANVDPTIGYKGITSFLVDRDTPGLHIGKPENKLGLRASSTCPLTFENVKVPEANILGQIGHGYKYAIGSLNEGRIGIAAQMLGLAQGCFDYTIPYIKERIQFGKRLFDFQGLQHQVAHVATQLEAARLLTYNAARLLEAGKPFIKEASMAKYYASEIAGQTTSKCIEWMGGVGYTKDYPVEKYFRDAKIGTIYEGASNIQLNTIAKHIDAEY

SEQ ID NO: 946 - protein, 294 aa, Homo Sapiens [sequence omitted]

SEQ ID NO: 947 - protein, 222 aa, Homo Sapiens
MAEKPKLHYSNIRGRMESIRWLLAAAGVEFEEKFIKSAEDLDKLRNDGYLMFQQVPMVEIDGMKLVQTRAILNYIASKYNLYGKDIKEKALIDMYIEGIADLGEMILLLPFSQPEEQDAKLALIQEKTKNRYFPAFEKVLKSHGQDYLVGNKLSRADIHLVELLYYVEELDSSLISSFPLLKALKTRISNLPTVKKFLQPGSPRKPPMDEKSLEESRKIFRF

SEQ ID NO: 948 - protein, 513 aa, Homo Sapiens [sequence omitted]

SEQ ID NO: 949 - protein, 490 aa, Homo Sapiens [sequence omitted]

SEQ ID NO: 950 - protein, 1508 aa, Homo Sapiens
RPRPQIIKMTRILTAFKVVRTLKTGFGFTNVTAHQKWKFSRPGIRLLSVKAQTAHIVLEDGTKMKGYSFGHPSSVAGEVVFNTGLGGYPEAITDPAYKGQILTMANPIIGNGGAPDTTALDELGLSKYLESNGIKVSGLLVLDYSKDYNHWLATKSLGQWLQEEKVPAIYGVDTRMLTKIIRDKGTMLGKIEFEGQPVDFVDPNKQNLIAEVSTKDVKVYGKGNPTKVVAVDCGIKNNVIRLLVKRGAEVHLVPWNHDFTKMEYDGILIAGGPGNPALAEPLIQNVRKILESDRKEPLFGISTGNLITGLAAGAKTYKMSMANRGQNQPVLNITNKQAFITAQNHGYALDNTLPAGWKPLFVNVNDQTNEGIMHESKPFFAVQFHPEVTPGPIDTEYLFDSFFSLIKKGKATTITSVLPKPALVASRVEVSKVLILGSGGLSIGQAGEFDYSGSQAVKAMKEENVKTVLMNPNIASVQTNEVGLKQADTVYFLPITPQFVTEVIKAEQPDGLILGMGGQTALNCGVELFKRGVLKEYGVKVLGTSVESIMATEDRQLFSDKLNEINEKIAPSFAVESIEDALKAADTIGYPVMIRSAYALGGLGSGICPNRETLMDLSTKAFAMTNQILVEKSVTGWKEIEYEVVRDADDNCVTVCNMENVDAMGVHTGDSVVVAPAQTLSNAEFQMLRRTSINVVRHLGIVGECNIQFALHPTSMEYCIIEVNARLSRSSALASKATGYPLAFIAAKIALGIPLPEIKNVVSGKTSACFEPSLDYMVTKIPRWDLDRFHGTSSRIGSSMKSVGEVMAIGRTFEESFQKALRMCHPSIEGFTPRLPMNKEWPSNLDLRKELSEPSSTRIYAIAKAIDDNMSLDEIEKLTYIDKWFLYKMRDILNMEKTLKGLNSESMTEETLKRAKEIGFSDKQISKCLGLTEAQTRELRLKKNIHPWVKQIDTLAAEYPSVTNYLYVTYNGQEHDVNFDDHGMMVLGCGPYHIGSSVEFDWCAVSSIRTLRQLGKKTVVVNCNPETVSTDFDECDKLYFEELSLERILDIYHQEACGGCIISVGGQIPNNLAVPLYKNGVKIMGTSPLQIDRAEDRSIFSAVLDELKVAQAPWKAVNTLNEALEFAKSVDYPCLLRPSYVLSGSAMNVVFSEDEMKKFLEEATRVSQEHPVVLTKFVEGAREVEMDAVGKDGRVISHAISEHVEDAGVHSGDATLMLPTQTISQGAIEKVKDATRKIAKAFAISGPFNVQFLVKGNDVLVIECNLRASRSFPFVSKTLGVDFIDVATKVMIGENVDEKHLPTLDHPIIPADYVAIKAPMFSWPRLRDADPILRCEMASTGEVACFGEGIHTAFLKAMLSTGFKIPQKGILIGIQQSFRPRFLGVAEQLHNEGFKLFATEATSDWLNANNVPATPVAWPSQEGQNPSLSSIRKLIRDGSIDLVINLPNNNTKFVHDNYVIRRTAVDSGIPLLTNFQVTKLFAEAVQKSRKVDSKSLFHYRQYSAGKAA

SEQ ID NO: 951 - protein, 347 aa, Homo Sapiens
MDDDIAALVVDNGSGMCKAGFAGDDAPRAVFPSIVGRPRHQGVMVGIVTNWDDMEKIWHHTFYNELRVAPEEHPVLLTEAPLNPKANREKMTQIMFETFNTPAMYVAIQAVLSLYASGRTTGIVMDSGDGVTHTVPIYEGYALPHAILRLDLAGRDLTDYLMKILTERGYSFTTTAEREIVRDIKEKLCYVALDFEQEMATAASSSSLEKSYELPDGQVITIGNERFRCPEALFQPSFLGMESCGIHETTFNSIMKCDVDIRKDLYANTVLSGGTTMYPGIADRMQKEITALAPSTMKIKIIAPPERKYSVWIGGSILASLSTFQQMWISKQEYDESGPSIVHRKCF

SEQ ID NO: 952 - protein, 199 aa, Homo Sapiens
MSSGNAKIGHPAPNFKATAVMPDGQFKDISLSDYKGKYVVFFFYPLDFTFVCPTEIIAFSDRAEEFKKLNCQVIGASVDSHFCHLAWVNTPKKQGGLGPMNIPLVSDPKRTIAQDYGVLKADEGISFRGLFIIDDKGILRQITVNDLPVGRSVDETLRLVQAFQFTDKHGEVCPAGWKPGSDTIKPDVQKSKEYFSKQK

SEQ ID NO: 953 - protein, 445 aa, Homo Sapiens
MREIVHLQAGQCGNQIGAKFWEVISDEHGIDPTGTYHGDSDLQLERINVYYNEATGGKYVPRAVLVDLEPGTMDSVRSGPFGQIFRPDNFVFGQSGAGNNWAKGHYTEGAELVDSVLDVVRKEAESCDCLQGFQLTHSLGGGTGSGMGTLLISKIREEYPDRIMNTFSVVPSPKVSDTVVEPYNATLSVHQLVENTDETYCIDNEALYDICFRTLKLTTPTYGDLNHLVSATMSGVTTCLRFPGQLNADLRKLAVNMVPFPRLHFFMPGFAPLTSRGSQQYRALTVPELTQQMFDAKNMMAACDPRHGRYLTVAAVFRGRMSMKEVDEQMLNVQNKNSSYFVEWIPNNVKTAVCDIPPRGLKMSATFIGNSTAIQELFKRISEQFTAMFRRKAFLHWYTGEGMDEMEFTEAESNMNDLVSEYQQYQDATAEEEGEFEEEAEEEVA

SEQ ID NO: 954 - protein, 248 aa, Homo Sapiens
MAGLNSLEAVKRKIQALQQQADEAEDRAQGLQRELDGERERREKAEGDVAALNRRIQLVEEELDRAQERLATALQKLEEAEKAADESERGMKVIENRAMKDEEKMEIQEMQLKEAKHIAEEADRKYEEVARKLVILEGELERAEERAEVSELKCGDLEEELKNVTNNLKSLEAASEKYSEKEDKYEEEIKLLSDKLKEAETRAEFAERTVAKLEKTIDDLEEKLAQAKEENVGLHQTLDQTLNELNCI

SEQ ID NO: 955 - protein, 543 aa, Homo Sapiens
MEQVNELKEKGNKALSVGNIDDALQCYSEAIKLDPHNHVLYSNRSAAYAKKGDYQKAYEDGCKTVDLKPDWGKGYSRKAAALEFLNRFEEAKRTYEEGLKHEANNPQLKEGLQNMEARLAERKFMNPFNMPNLYQKLESDPRTRTLLSDPTYRELIEQLRNKPSDLGTKLQDPRIMTTLSVLLGVDLGSMDEEEEIATPPPPPPPKKETKPEPMEEDLPENKKQALKEKELGNDAYKKKDFDTALKHYDKAKELDPTNMTYITNQAAVYFEKGDYNKCRELCEKAIEVGRENREDYRQIAKAYARIGNSYFKEEKYKDAIHFYNKSLAEHRTPDVLKKCQQAEKILKEQERLAYINPDLALEEKNKGNECFQKGDYPQAMKHYTEAIKRNPKDAKLYSNRAACYTKLLEFQLALKDCEECIQLEPTFIKGYTRKAAALEAMKDYTKAMDVYQKALDLDSSCKEAADGYQRCMMAQYNRHDSPEDVKRRAMADPEVQQIMSDPAMRLILEQMQKDPQALSEHLKNPVIAQKIQKLMDVGLIAIR

SEQ ID NO: 956 - protein, 375 aa, Homo Sapiens
MDDDIAALVVDNGSGMCKAGFAGDDAPRAVFPSIVGRPRHQGVMVGMGQKDSYVGDEAQSKRGILTLKYPIEHGIVTNWDDMEKIWHHTFYNELRVAPEEHPVLLTEAPLNPKANREKMTQIMFETFNTPAMYVAIQAVLSLYASGRTTGIVMDSGDGVTHTVPIYEGYALPHAILRLDLAGRDLTDYLMKILTERGYSFTTTAEREIVRDIKEKLCYVALDFEQEMATAASSSSLEKSYELPDGQVITIGNERFRCPEALFQPSFLGMESCGIHETTFNSIMKCDVDIRKDLYANTVLSGGTTMYPGIADRMQKEITALAPSTMKIKIIAPPERKYSVWIGGSILASLSTFQQMWISKQEYDESGPSIVHRKCF

SEQ ID NO: 957 - protein, 806 aa, Homo Sapiens
MASGADSKGDDLSTAILKQKNRPNRLIVDEAINEDNSVVSLSQPKMDELQLFRGDTVLLKGKKRREAVCIVLSDDTCSDEKIRMNRVVRNNLRVRLGDVISIQPCPDVKYGKRIHVLPIDDTVEGITGNLFEVYLKPYFLEAYRPIRKGDIFLVRGGMRAVEFKVVETDPSPYCIVAPDTVIHCEGEPIKREDEEESLNEVGYDDIGGCRKQLAQIKEMVELPLRHPALFKAIGVKPPRGILLYGPPGTGKTLIARAVANETGAFFFLINGPEIMSKLAGESESNLRKAFEEAEKNAPAIIFIDELDAIAPKREKTHGEVERRIVSQLLTLMDGLKQRAHVIVMAATNRPNSIDPALRRFGRFDREVDIGIPDATGRLEILQIHTKNMKLADDVDLEQVANETHGHVGADLAALCSEAALQAIRKKMDLIDLEDETIDAEVMNSLAVTMDDFRWALSQSNPSALRETVVEVPQVTWEDIGGLEDVKRELQELVQYPVEHPDKFLKFGMTPSKGVLFYGPPGCGKTLLAKAIANECQANFISIKGPELLTMWFGESEANVREIFDKARQAAPCVLFFDELDSIAKARGGNIGDGGGAADRVINQILTEMDGMSTKKNVFIIGATNRPDIIDPAILRPGRLDQLIYIPLPDEKSRVAILKANLRKSPVAKDVDLEFLAKMTNGFSGADLTEICQRACKLAIRESIESEIRRERERQTNPSAMEVEEDDPVPEIRRDHFEEAMRFARRSVSDNDIRKYEMFAQTLQQSRGFGSFRFPSGNQGGAGPSQGSGGGTGGSVYTEDNDDDLYG

SEQ ID NO: 958 - protein, 495 aa, Homo Sapiens
MSMLVVFLLLWGVTWGPVTEAAIFYETQPSLWAESESLLKPLANVTLTCQAHLETPDFQLFKNGVAQEPVHLDSPAIKHQFLLTGDTQGRYRCRSGLSTGWTQLSKLLELTGPKSLPAPWLSMAPVSWITPGLKTTAVCRGVLRGVTFLLRREGDHEFLEVPEAQEDVEATFPVHQPGNYSCSYRTDGEGALSEPSATVTIEELAAPPPPVLMHHGESSQVLHPGNKVTLTCVAPLSGVDFQLRRGEKELLVPRSSTSPDRIFFHLNAVALGDGGHYTCRYRLHDNQNGWSGDSAPVELILSDETLPAPEFSPEPESGRALRLRCLAPLEGARFALVREDRGGRRVHRFQSPAGTEALFELHNISVADSANYSCVYVDLKPPFGGSAPSERLELHVDGPPPRPQLRATWSGAVLAGRDAVLRCEGPIPDVTFELLREGETKAVKTVRTPGAAANLELIFVGPQHAGNYRCRYRSWVPHTFESELSDPVELLVAES

SEQ ID NO: 959 - protein, 494 aa, Homo Sapiens
MSKGPAVGIDLGTTYSCVGVFQHGKVEIIANDQGNRTTPSYVAFTDTERLIGDAAKNQVAMNPTNTVFDAKRLIGRRFDDAVVQSDMKHWPFMVVNDAGRPKVQVEYKGETKSFYPEEVSSMVLTKMKEIAEAYLGKTVTNAVVTVPAYFNDSQRQATKDAGTIAGLNVLRIINEPTAAAIAYGLDKKVGAERNVLIFDLGGGTFDVSILTIEDGIFEVKSTAGDTHLGGEDFDNRMVNHFIAEFKRKHKKDISENKRAVRRLRTACERAKRTLSSSTQASIEIDSLYEGIDFYTSITRARFEELNADLFRGTLDPVEKALRDAKLDKSQIHDIVLVGGSTRIPKIQKLLQDFFNGKELNKSINPDEAVAYGAAVQAAILSGDKSENVQDLLLLDVTPLSLGIETAGGVMTVLIKRNTTIPTKQTQTFTTYSDNQPGVLIQVYEGERAMTKDNNLLGKFELTGGMPGGMPGGFPGGGAPPSGGASSGPTIEEVD

SEQ ID NO: 960 - protein, 162 aa, Homo Sapiens
MAVLAALLRSGARSRSPLLRRLVQEIRYVERSYVSKPTLKEVVIVSATRTPIGSFLGSLSLLPATKLGSIAIQGAIEKAGIPKEEVKEAYMGNVLQGGEGQAPTRQAVLGAGLPISTPCTTINKVCASGMKAIMMASQSLMCGHQIKQETGSLAKICCHVRR

SEQ ID NO: 961 - protein, 565 aa, Homo Sapiens
MDLEAWDPHLEPDAEAMVDGNTKKEGDLIAAQARLKDLEALLNSKEAALSTALSEKRTLEGELHDLRGQVAKLEAALGEAKKQLQDEMLRRVDAENRLQTMKEELDFQKNIYSEELRETKRRHETRLVEIDNGKQREFESRLADALQELRAQHEDQVEQYKKELEKTYSAKLDNARQSAERNSNLVGAAHEELQQSRIRIDSLSAQLSQLQKQLAAKEAKLRDLEDSLARERDTSRRLLAEKEREMAEMRARMQQQLDEYQELLDIKLALDMEIHAYRKLLEGEEERLRLSPSPTSQRSRGRASSHSSQTQGGGSVTKKRKLESTESRSSFSQHARTSGRVAVEEVDEEGKFVRLRNKSNEDQSMGNWQIKRQNGDDPLLTYRFPPKFTLKAGQVVTIWAAGAGATHSPPTDLVWKAQNTWGCGNSLRTALINSTGEEVAMRKLVRSVTVVEDDEDEDGDDLLHHHHGSHCSSSGDPAEYNLRSRTVLCGTCGQPADKASASGSGAQVGGPISSGSSASSVTVTRSYRSVGGSGGGSFGDNLVTRSYLLGNSSPRTQSPQNCSIM

SEQ ID NO: 962 - protein, 413 aa, Homo Sapiens
MGRGTKVILHLKEDQTEYLEERRIKEIVKKHSQFIGYPITLFVEKERDKEVSDDEAEEKEDKEEEKEKEEKESEDKPEIEDVGSDEEEEKKDGDKKKKKKIKEKYIDQEELNKTKPIWTRNPDDITNEEYGEFYKSLTNDWEDHLAVKHFSVEGQLEFRALLFVPRRAPFDLFENRKKKNNIKLYVRRVFIMDNCEELIPEYLNFIRGVVDSEDLPLNISREMLQQSKILKVIRKNLVKKCLELFTELAEDKENYKKFYEQFSKNIKLGIHEDSQNRKKLSELLRYYTSASGDEMVSLKDYCTRMKENQKHIYYITGETKDQVANSAFVERLRKHGLEVIYMIEPIDEYCVQQLKEFEGKTLVSVTKEGLELPEDEEEKKKQEEKKTKFENLCKIMKDILEKKVEKVCEYSIS

SEQ ID NO: 963 - protein, 472 aa, Homo Sapiens [sequence omitted]

SEQ ID NO: 964 - protein, 651 aa, Homo Sapiens
MARELRALLLWGRRLRPLLRAPALAAVPGGSTSKHEFQAETKKLLDIVARSLYSEKEVFIRELISNASDALEKLRHKLVSDGQALPEMEIHLQTNAEKGTITIQDTGIGMTQEELVSNLGTIARSGSKAFLDALQNQAEASSKIIGQFGVGFYSAFMVADRVEVYSRSAAPGSLGYQWLSDGSGVFEIAEASGVRTGTKIIIHLKSDCKEFSSEARVRDVVTKYSNFVSFPLYLNGRRMNTLQAIWMMDPKDVREWQHEEFYRYVAQAHDKPRYTLHYKTDAPLNIRSIFYVPDMKPSMFDVSRELGSSVALYSRKVLIQTKATDILPKWLRFIRGVVDSEDIPLNLSRELLQESALIRKLRDVLQQRLIKFFIDQSKKDAEKYAKFFEDYGLFMREGIVTATEQEVKEDIAKLLRYESSALPSGQLTSLSEYASRMRAGTRNIYYLCAPNRHLAEHSPYYEAMKKKDTEVLFCFEQFDELTLLHLREFDKKKLISVETDIVVDHYKEEKFEDRSPAAECLSEKETEELMAWMRNVLGSRVTNVKVTLRLDTHPAMVTVLEMGAARHFLRMQQLAKTQEERAQLLQPTLEINPRHALIKKLNQLRASEPGLAQLLVDQIYENAMIAAGLVDDPRAMVGRLNELLVKALERH

SEQ ID NO: 965 - protein, 147 aa, Homo Sapiens
MVHLTPEEKSAVTALWGKVNVDEVGGEALGRLLVVYPWTQRFFESFGDLSTPDAVMGNPKVKAHGKKVLGAFSDGLAHLDNLKGTFATLSELHCDKLHVDPENFRLLGNVLVCVLAHHFGKEFTPPVQAAYQKVVAGVANALAHKYH

SEQ ID NO: 966 - protein, 805 aa, Homo Sapiens
MAPYSLLVTRLQKALGVRQYHVASVLCQRAKVAMSHFEPNEYIHYDLLEKNINIVRKRLNRPLTLSEKIVYGHLDDPASQEIERGKSYLRLRPDRVAMQDATAQMAMLQFISSGLSKVAVPSTIHCDHLIEAQVGGEKDLRRAKDINQEVYNFLATAGAKYGVGFWKPGSGIIHQIILENYAYPGVLLIGTDSHTPNGGGLGGICIGVGGADAVDVMAGIPWELKCPKVIGVKLTGSLSGWSSPKDVILKVAGILTVKGGTGAIVEYHGPGVDSISCTGEEGGQATWPLPCAGPDGSPVGSRSGMATICNMGAEIGATTSVFPYNHRMKKYLSKTGREDIANLADEFKDHLVPDPGCHYDQLIEINLSELKPHINGPFTPDLAHPVAEVGKVAEKEGWPLDIRVGLIGSCTNSSYEDMGRSAAVAKQALAHGLKCKSQFTITPGSEQIRATIERDGYAQILRDLGGIVLANACGPCIGQWDRKDIKKGEKNTIVTSYNRNFTGRNDANPETHAFVTSPEIVTALAIAGTLKFNPETDYLTGTDGKKFRLEAPDADELPKGEFDPGQDTYQHPPKDSSGQHVDVSPTSQRLQLLEPFDKWDGKDLEDLQILIKVKGKCTTDHISAAGPWLKFRGHLDNISNNLLIGAINIENGKANSVRNAVTQEFGPVPDTARYYKKHGIRWVVIGDENYGEGSSREHAALEPRHLGGRAIITKSFARIHETNLKKQGLLPLTFADPADYNKIHPVDKLTIQGLKDFTPGKPLKCIIKHPNGTQETILLNHTFNETQIEWFRAGSALNRMKELQQ

SEQ ID NO: 967 - protein, 941 aa, Homo Sapiens
MSDAAEAPREATGENGETEMKEEEEPNPNYKEVEDPQQESKDDTIAWRESQEEERKTGEEEGEEEGKEDKKIVMEETEEKAGEVQEKEASGIQEETTVEPQEVTASMIRLETQITDSQSITSGIFPKTQRGSKSKLSLQLEDAETDELLRDLSTQIEFLDLDQISPEEQQISSPERQPSGELEEKTDRMPQDELGQERRDLEPENREEGQERRVSDIQSKAGISRESLVSSTTEDILFQKDKSTPVYPLTMTWSFGWNSSLPVYYIREERQRVLLYVCAHTAIIYNVFRNNQYHLQGHANIISCLCVSEDRRWIATADKGPDCLVIIWDSFTGIPVHTIFDSCPEGNGIMAMAMTHDAKYLATISDAEVQKVCIWKWTLAVETPACTLELPTEYGVQNYVTFNPTNNKELVSNSKTRAIYYAWYEERDTLAHSAPLLTEKTFNKLVGKFSQSIFHLNLTQILSATMEGKLVVWDIHRPPSSASTFLGFPYIKPCKLVHLQKEGITVLTTIDSYIVTGDIKGNIKFYDHTLSIVNWYSHLKLGAIRTLSFSKTPATPPTEKSNYPPDCTLKGDLFVLRNFIIGTSDAAVYHLTTDGTKLEKLFVEPKDAICAISCHPYQPLIAIGSICGMIKVWNYENKQYLFSRVFEKGLGVQSLTYNPEGALLGAGFTEGTVYILDAMSLENESPEPFKYSRTSVTHISFSHDSQYMATADRSFTVAVYMLVVRNGQRVWEYLARLRSHRKSIRSLLFGVYLDSNEPRLLSLGTDRLLIEYDLLRSYKDHLEVLDIHHTDQGCYPTCMVWYPPLTRELFLLICNSGYKVKLFNATTKMCRKTLLGPAYGSPIEQTQVLPVRSMAELQKRYLVFINRDKVGLQILPVDGNPHKTSAIVCHPNGVAGMAVSYDGCYAFTAGGHDRSVVQWKITLSHPGSQAPILSPSDTSRS

SEQ ID NO: 968 - protein, 156 aa, Homo Sapiens
MERLSVDYGKKSKLEFSIYPAPQVSTAVVEPYNSILTTHTTLEHSDCAFMVDNEAIYDICRRNLDIERPTYTNLNRLISQIVSSITASLRFDGALNVDLTEFQTNLVPYPRIHFPLATYAPVISAEKAYHEQLSVAEITNACFEPANQMVKCDPRH

SEQ ID NO: 969 - protein, 641 aa, Homo Sapiens
MAKAAAIGIDLGTTYSCVGVFQHGKVEIIANDQGNRTTPSYVAFTDTERLIGDAAKNQVALNPQNTVFDAKRLIGRKFGDPVVQSDMKHWPFQVINDGDKPKVQVSYKGDTKAFYPEEISSMVLTKMKEIAEAYLGYPVTNAVITVPAYFNDSQRQATKDAGVIAGLNVLRIINEPTAAAIAYGLDRTGKGERNVLIFDLGGGTFDVSILTIDDGIFEVKATAGDTHLGGEDFDNRLVNHFVEEFKRKHKKDISQNKRAVRRLRTACERAKRTLSSSTQASLEIDSLFEGIDFYTSITRARFEELCSDLFRSTLEPVEKALRDAKLDKAQIHDLVLVGGSTRIPKVQKLLQDFFNGRDLNKSINPDEAVAYGAAVQAAILMGDKSENVQDLLLLDVAPLSLGLETAGGVMTALIKRNSTIPTKQTQIFTTYSDNQPGVLIQVYEGERAMTKDNNLLGRFELSGIPPAPRGVPQIEVTFDIDANGILNVTATDKSTGKANKITITNDKGRLSKEEIERMVQEAEKYKAEDEVQRERVSAKNALESYAFNMKSAVEDEGLKGKISEADKKKVLDKCQEVISWLDANTLAEKDEFEHKRKELEQVCNPIISGLYQGAGGPGPGGFGAQGPKGGSGSGPTIEEVD

SEQ ID NO: 970 - protein, 583 aa, Homo Sapiens
MPKPINVRVTTMDAELEFAIQPNTTGKQLFDQVVKTVGLREVWFFGLQYVDSKGYSTWLKLNKKVTQQDVKKENPLQFKFRAKFFPEDVSEELIQEITQRLFFLQVKEAILNDEIYCPPETAVLLASYAVQAKYGDYNKEIHKPGYLANDRLLPQRVLEQHKLTKEQWEERIQNWHEEHRGMLREDSMMEYLKIAQDLEMYGVNYFEIKNKKGTELWLGVDALGLNIYEHDDKLTPKIGFPWSEIRNISFNDKKFVIKPIDKKAPDFVFYAPRLRINKRILALCMGNHELYMRRRKPDTIEVQQMKAQAREEKHQKQLERAQLENEKKKREIAEKEKERIEREKEELMERLKQIEEQTIKAQKELEEQTRKALELDQERKRAKEEAERLEKERRAAEEAKSAIAKQAADQMKNQEQLAAELAEFTAKIALLEEAKKKKEEEATEWQHKAFAAQEDLEKTKEELKTVMSAPPPPPPPPVIPPTENEHDEHDENNAEASAELSNEGVMNHRSEEERVTETQKNERVKKQLQALSSELAQARDETKKTQNDVLHAENVKAGRDKYKTLRQIRQGNTKQRIDEFEAM

SEQ ID NO: 971 - protein, 190 aa, Homo Sapiens
MGPLPRTVELFYDVLSPYSWLGFEILCRYQNIWNINLQLRPSLITGIMKDSGNKPPGLLPRKGLYMANDLKLLRHHLQIPIHFPKDFLSVMLEKGSLSAMRFLTAVNLEHPEMLEKASRELWMRVWSRNEDITEPQSILAAAEKAGMSAEQAQGLLEKIATPKVKNQLKETTEAACRYGERSGWALYLQP

SEQ ID NO: 972 - protein, 120 aa, Homo Sapiens
MVNPTVFFDIAVDGEPLGRVSFELFADKVPKTAENFRALSTGEKGFGYKGSCFHRIIPGFMCQGGDFTRHNGTGGKSIYGEKFEDENFILKHTGPGILSMANAGPNTNGSQFFICTAKTE

SEQ ID NO: 973 - protein, 121 aa, Homo Sapiens
MVNPTVFFDIAVDGEPLGRVSFELFADKVPKTAENFRALSTGEKGFGYKGSCFHRIIPGFMCQGGDFTRHNGTGGKSIYGEKFEDENFILKHTGPGILSMANAGPNTNGSQFFICTAKTEW

SEQ ID NO: 974 - protein, 264 aa, Homo Sapiens
MSGALDVLQMKEEDVLKFLAAGTHLGGTNLDFQMEQYIYKRKSDGIYIINLKRTWEKLLLAARAIVAIENPADVSVISSRNTGQRAVLKFAAATGATPIAGRFTPGTFTNQIQAAFREPRLLVVTDPRADHQPLTEASYVNLPTIALCNTDSPLRYVDIAIPCNNKGAHSVGLMWWMLAREVLRMRGTISREHPWEVMPDLYFYRDPEEIEKEEQAAAEKAVTKEEFQGEWTAPAPEFTATQPEVADWSEGVQVPSVPIQQFPT

SEQ ID NO: 975 - protein, 473 aa, Homo Sapiens [sequence omitted]

SEQ ID NO: 976 - protein, 1663 aa, Homo Sapiens; identical to SEQ ID NO: 831

SEQ ID NO: 977 - protein, 624 aa, Homo Sapiens
MAKAAAIGIDLGTTYSCVGVFQHGKVEIIANDQGNRTTPSYVAFTDTERLIGDAAKNQVALNPPVVQSDMKHWPFQVINDGDKPKVQVSYKGETKAFYPEEISSMVLTKMKEIAEAYLGYPVTNAVITVPAYFNDSQRQATKDAGVIAGLNVLRIINEPTAAAIAYGLDRTGKGERNVLIFDLGGGTFDVSILTIDDGIFEVKATAGDTHLGGEDFDNRLVNHFVEEFKRKHKKDISQNKRAVRRLRTACERAKRTLSSSTQASLEIDSLFEGIDFYTSITRARFEELCSDLFRSTLEPVEKALRDAKLDKAQIHDLVLVGGSTRIPKVQKLLQDFFNGRDLNKSINPDEAVAYGAAVQAAILMGDKSENVQDLLLLDVAPLSLGLETAGGVMTALIKRNSTIPTKQTQIFTTYSDNQPGVLIQVYEGERAMTKDNNLLGRFELSGIPPAPRGVPQIEVTFDIDANGILNVTATDKSTGKANKITITNDKGRLSKEEIERMVQEAEKYKAEDEVQRERVSAKNALESYAFNMKSAVEDEGLKGKISEADKKKVLDKCQEVISWLDANTLAEKDEFEHKRKELEQVCNPIISGLYQGAGGPGPGGFGAQGPKGGSGSGPTIEEVD

SEQ ID NO: 978 - protein, 268 aa, Homo Sapiens
MCPEDSLQVPLKDAKSCGLHQLLRGPEVQLVAHSPWLKDSLSRTTNIQGINLLFSSRRGHLFLQTDQPIYNPGQRVRYRVFALDQKMRPSTDTITVMVENSHGLRVRKKEVYMPSSIFQDDFVIPDISEPGTWKISARFSDGLESNSSTQFEVKKYVLPNFEVKITPGKPYILTVPGHLDEMQLDIQARYIYGKPVQGVAYVRFGLLDEDGKKTFFRGLESQTKLVNGQSHISLSKAEFQDALEKLNMGITDLQGLRLYVAAAIIESP

SEQ ID NO: 979 - protein, 606 aa, Homo sapiens; identical to SEQ ID NO: 525

SEQ ID NO: 980 - protein, 725 aa, Homo sapiens
MADEDLIFRLEGVDGGQSPRAGHDGDSDGDSDDEEGYFICPITDDPSSNQNVNSKVNKYYSNLTKSERYSSSGSPANSFHFKEAWKHAIQKAKHMPDPWAEFHLEDIATERATRHRYNAVTGEWLDDEVLIKMASQPFGRGAMRECFRTKKLSNFLHAQQWKGASNYVAKRYIEPVDRDVYFEDVRLQMEAKLWGEEYNRHKPPKQVDIMQMCIIELKDRPGKPLFHLEHYIEGKYIKYNSNSGFVRDDNIRLTPQAFSHFTFERSGHQLIVVDIQGVGDLYTDPQIHTETGTDFGDGNLGVRGMALFFYSHACNRICESMGLAPFDLSPRERDAVNQNTKLLQSAKTILRGTEEKCGSPQVRTLSGSRPPLLRPLSENSGDENMSDVTFDSLPSSPSSATPHSQKLDHLHWPVFSDLDNMASRDHDHLDNHRESENSGDSGYPSEKRGELDDPEPREHGHSYSNRKYESDEDSLGSSGRVCVEKWNLLNSSRLHLPRASAVALEVQRLNALDLEKKIGKSILGKVHLAMVRYHEGGRFCEKGEEWDQESAVFHLEHAANLGELEAIVGLGLMYSQLPHHILADVSLKETEENKTKGFDYLLKAAEAGDRQSMILVARAFDSGQNLSPDRCQDWLEALHWYNTALEMTDCDEGGEYDGMQDEPRYMMLAREAEMLFTGGYGLEKDPQRSGDLYTQAAEAAMEAMKGRLANQYYQKAEEAWAQMEE

SEQ ID NO: 981 - protein, 487 aa, Homo sapiens
METVQLRNPPRRQLKKLDEDSLTKQPEEVFDVLEKLGEGSYGSVYKAIHKETGQIVAIKQVPVESDLQEIIKEISIMQQCDSPHVVKYYGSYFKNTDLWIVMEYCGAGSVSDIIRLRNKTLTEDEIATILQSTLKGLEYLHFMRKIHRDIKAGNILLNTEGHAKLADFGVAGQLTDTMAKRNTVIGTPFWMAPEVIQEIGYNCVADIWSLGITAIEMAEGKPPYADIHPMRAIFMIPTNPPPTFRKPELWSDNFTDFVKQCLVKSPEQRATATQLLQHPFVRSAKGVSILRDLINEAMDVKLKRQESQQREVDQDDEENSEEDEMDSGTMVRAVGDEMGTVRVASTMTDGANTMIEHDDTLPSQLGTMVINAEDEEEEGTMKRRDETMQPAKPSFLEYFEQKEKENQINSFGKSVPGPLKNSSDWKIPQDGDYEFLKSWTVEDLQKRLLALDPMMEQEIEEIRQKYQSKRQPILDAIEAKKRRQQNF

SEQ ID NO: 982 - protein, 491 aa, Homo sapiens
MEQPPAPKSKLKKLSEDSLTKQPEEVFDVLEKLGEGSYGSVFKAIHKESGQVVAIKQVPVESDLQEIIKEISIMQQCDSPYVVKYYGSYFKNTDLWIVMEYCGAGSVSDIIRLRNKTLIEDEIATILKSTLKGLEYLHFMRKIHRDIKAGNILLNTEGHAKLADFGVAGQLTDTMAKRNTVIGTPFWMAPEVIQEIGYNCVADIWSLGITSIEMAEGKPPYADIHPMRAIFMIPTNPPPTFRKPELWSDDFTDFVKKCLVKNPEQRATATQLLQHPFIKNAKPVSILRDLITEAMEIKAKRHEEQQRELEEEEENSDEDELDSHTMVKTSVESVGTMRATSTMSEGAQTMIEHNSTMLESDLGTMVINSEDEEEEDGTMKRNATSPQVQRPSFMDYFDKQDFKNKSHENCNQNMHEPFPMSKNVFPDNWKVPQDGDFDFLKNLSLEELQMRLKALDPMMEREIEELRQRYTAKRQPILDAMDAKKRRQQNF

SEQ ID NO: 983 - protein, 1019 aa, Homo sapiens
MWVQGHSSRASATESVSFSGIVQMDEDTHYDKVEDVVGSHIEDAVTFWAQSINRNKDIMKIGCSLSEVCPQASSVLGNLDPNKIYGGLFSEDQCWYRCKVLKIISVEKCLVRYIDYGNTEILNRSDIVEIPLELQFSSVAKKYKLWGLHIPSDQEVTQFDQGTTFLGSLIFEKEIKMRIKATSEDGTVIAQAEYGSVDIGEEVLKKGFAEKCRLASRTDICEEKKLDPGQLVLRNLKSPIPLWGHRSNQSTFSRPKGHLSEKMTLDLKDENDAGNLITFPKESLAVGDFNLGSNVSLEKIKQDQKLIEENEKLKTEKDALLESYKALELKVEQIAQELQQEKAAAVDLTNHLEYTLKTYIDTRMKNLAAKMEILKEMRHVDISVRFGKDLSDAIQVLDEGCFTTPASLNGLEIIWAEYSLAQENIKTCEYVSEGNILIAQRNEMQQKLYMSVEDFILEVDESSLNKRLKTLQDLSVSLEAVYGQAKEGANSDEILKKFYDWKCDKREEFTSVRSETDASLHRLVAWFQRTLKVFDLSVEGSLISEDAMDNIDEILEKTESSVCKELEIALVDQGDADKEIISNTYSQVLQKIHSEERLIATVQAKYKDSIEFKKQLIEYLNKSPSVDHLLSIKKTLKSLKALLRWKLVEKSNLEESDDPDGSQIEKIKEEITQLRNNVFQEIYHEREEYEMLTSLAQKWFPELPLLHPEIGLLKYMNSGGLLTMSLERDLLDAEPMKELSSKRPLVRSEVNGQIILLKGYSVDVDTEAKVIERAATYHRAWREAEGDSGLLPLIFLFLCKSDPMAYLMVPYYPRANLNAVQANMPLNSEETLKVMKGVAQGLHTLHKADIIHGSLHQNNVFALNREQGIVGDFDFTKSVSQRASVNMMVGDLSLMSPELKMGKPASPGSDLYAYGCLLLWLSVQNQEFEINKDGIPKVDQFHLDDKVKSLLCSLICYRSSMTAEQVLNAECFLMPKEQSVPNPEKDTEYTLYKKEEEIKTENLDKCMEKTRNGEANFDC

1. A method for identifying biomarkers specific for a particular disease comprising the steps
a) determining if a particular protein is differentially expressed in cause of this particular disease by 2-D gel electrophoresis and
b) determining if this particular protein is differentially expressed in cause of this particular disease by liquid chromatography-mass spectrometry (LC-MS).

2. A method according to claim 1, wherein the gel-based approach is 2D-DIGE and wherein the LC-MS-based approach is MALDI, preferably MALDI-TOF-MS or nan-HPLC-ESI-MS/MS.

3. A method according to one of the previous claims, wherein the particular disease is hepatocellular carcinoma (HCC).

4. Biomarker for HCC identified by a method according to one of the previous claims and selected from the proteins defined by SEQ ID No. 1 to 983, the respective homologues of SEQ ID No. 1 to 983 with at least 95% identity in amino acid sequence, the respective isoforms of proteins defined by SEQ ID No. 1 to 983, the respective partial sequences of SEQ ID No. 1 to 983.

5. Biomarker according to claim 4, characterized in that the biomarker is selected from PPA1, IGHG1, IGHV4-31, SERPINA1, VIM, LMNA, KRT18, GAPDH, PKM2, HSPA9, HSPA5, TRAP1, ACO2, HSPA8, CCT5, ECH1, SOD1, CA2, QDPR, AGXT, SORD, GLUD1, CPS1, ALDH6A1, GRHPR, UGP2, ALDH2, ECHS1, AKR1C4, ALDH1A1, MPST, ASS1, ACADS, ALDOB, ACAADSB, KHK, SARDH, FTCD, CES1, BDH1, PBLD, FBP1, BHMT, GNMT, ALB, PPIA, MTHFD1, ACAT1, PCK2, GATM, ADH1B, ADH4, Elongation factor 2 (eEF2), Elongation factor 2 kinase, Isoform of 14-3-3 Protein Sigma, Serine/Threonine Kinase 3, Serine/Threonine Kinase 4, Serine/Threonine Kinase 31.

6. Use of one or more proteins selected from the proteins defined by SEQ ID No. 1 to 983, the respective homologues of SEQ ID No. 1 to 983 with at least 95% identity in amino acid sequence, the respective isoforms of proteins defined by SEQ ID No. 1 to 983, the respective partial sequences of SEQ ID No. 1 to 983 as biomarker(s) for HCC.

7. Use as claimed in claim 6, wherein the protein(s) is/are selected from PPA1, IGHG1, IGHV4-31, SERPINA1, VIM, LMNA, KRT18, GAPDH, PKM2, HSPA9, HSPA5, TRAP1, ACO2, HSPA8, CCT5, ECH1, SOD1, CA2, QDPR, AGXT, SORD, GLUD1, CPS1, ALDH6A1, GRHPR, UGP2, ALDH2, ECHS1, AKR1C4, ALDH1A1, MPST, ASS1, ACADS, ALDOB, ACAADSB, KHK, SARDH, FTCD, CES1, BDH1, PBLD, FBP1, BHMT, GNMT, ALB, PPIA, MTHFD1, ACAT1, PCK2, GATM, ADH1B, ADH4, Elongation factor 2 (eEF2), Elongation factor 2 kinase, Isoform of 14-3-3 Protein Sigma, Serine/Threonine Kinase 3, Serine/Threonine Kinase 4, Serine/Threonine Kinase 31.

8. Use according to claim 6 or 7 for differential diagnosis, in particular for early recognition, diagnosis, prognosis, evaluation of disease progression, prediction of outcome, evaluation of treatment, surveillance of treatment, surveillance of after-treatment of HCC.

9. A method for studying a biological sample for HCC, wherein the sample is studied for one or more biomarker(s) for HCC and wherein the biomarker(s) is/are differentially expressed in relation to the healthy state indicating the presence of HCC, characterized in that the biomarker(s) is/are selected from the group comprising proteins defined by SEQ ID No. 1 to 983, the respective isoforms of the proteins defined by SEQ ID. No. 1 to 983, the respective homologues of SEQ ID No. 1 to 983 with at least 95% identity in amino acid sequence, the respective partial sequences of SEQ ID No. 1 to 983.

10. A method according to claim 9, characterized in that the biomarker(s) is/are selected from the group comprising PPA1, IGHG1, IGHV4-31, SERPINA1, VIM, LMNA, KRT18, GAPDH, PKM2, HSPA9, HSPA5, TRAP1, ACO2, HSPA8, CCT5, ECH1, SOD1, CA2, QDPR, AGXT, SORD, GLUD1, CPS1, ALDH6A1, GRHPR, UGP2, ALDH2, ECHS1, AKR1C4, ALDH1A1, MPST, ASS1, ACADS, ALDOB, ACAADSB, KHK, SARDH, FTCD, CES1, BDH1, PBLD, FBP1, BHMT, GNMT, ALB, PPIA, MTHFD1, ACAT1, PCK2, GATM, ADH1B, ADH4 Elongation factor 2 (eEF2), Elongation factor 2 kinase, Isoform of 14-3-3 Protein Sigma, Serine/Threonine Kinase 3, Serine/Threonine Kinase 4, Serine/Threonine Kinase 31.

11. A method according to claim 9 or 10, wherein the sample is a human sample.

12. A method according to claims 9 to 11, wherein the sample is blood serum, blood plasma, whole blood, a biopsy sample, in particular a liver biopsy sample.

13. Diagnostic device or test kit for analysing the amount of at least one biomarker selected from the group comprising proteins defined by SEQ ID No. 1 to 983, preferably selected from proteins PPA1, IGHG1, IGHV4-31, SERPINA1, VIM, LMNA, KRT18, GAPDH, PKM2, HSPA9, HSPA5, TRAP1, ACO2, HSPA8, CCT5, ECH1, SOD1, CA2, QDPR, AGXT, SORD, GLUD1, CPS1, ALDH6A1, GRHPR, UGP2, ALDH2, ECHS1, AKR1C4, ALDH1A1, MPST, ASS1, ACADS, ALDOB, ACAADSB, KHK, SARDH, FTCD, CES1, BDH1, PBLD, FBP1, BHMT, GNMT, ALB, PPIA, MTHFD1, ACAT1, PCK2, GATM, ADH1B, ADH4, Elongation factor 2 (eEF2), Elongation factor 2 kinase, Isoform of 14-3-3 Protein Sigma, Serine/Threonine Kinase 3, Serine/Threonine Kinase 4, Serine/Threonine Kinase 31 and the respective isoforms, the respective homologues with at least 95% identity in amino acid sequence, the respective partial sequences, and wherein the diagnostic device or test kit comprises detection reagents and further aids.

14. A diagnostic device or a test kit according to claim 13, wherein the detection reagent comprises an antibody specific for the respective biomarker.

15. Use of a method as claimed in claims 9 to 12 to identify in a sample at least one HCC specific biomarker as defined by SEQ ID No. 1 to 983, preferably proteins PPA1, IGHG1, IGHV4-31, SERPINA1, VIM, LMNA, KRT18, GAPDH, PKM2, HSPA9, HSPA5, TRAP1, ACO2, HSPA8, CCT5, ECH1, SOD1, CA2, QDPR, AGXT, SORD, GLUD1, CPS1, ALDH6A1, GRHPR, UGP2, ALDH2, ECHS1, AKR1C4, ALDH1A1, MPST, ASS1, ACADS, ALDOB, ACAADSB, KHK, SARDH, FTCD, CES1, BDH1, PBLD, FBP1, BHMT, GNMT, ALB, PPIA, MTHFD1, ACAT1, PCK2, GATM, ADH1B, ADH4, Elongation factor 2 (eEF2), Elongation factor 2 kinase, Isoform of 14-3-3 Protein Sigma, Serine/Threonine Kinase 3, Serine/Threonine Kinase 4, Serine/Threonine Kinase 31 and the respective isoforms, the respective homologues with at least 95% identity in amino acid sequence, the respective partial sequences.

16. Use of at least one specific biomarker selected from the group of defined by SEQ ID No. 1 to 983, preferably proteins PPA1, IGHG1, IGHV4-31, SERPINA1, VIM, LMNA, KRT18, GAPDH, PKM2, HSPA9, HSPA5, TRAP1, ACO2, HSPA8, CCT5, ECH1, SOD1, CA2, QDPR, AGXT, SORD, GLUD1, CPS1, ALDH6A1, GRHPR, UGP2, ALDH2, ECHS1, AKR1C4, ALDH1A1, MPST, ASS1, ACADS, ALDOB, ACAADSB, KHK, SARDH, FTCD, CES1, BDH1, PBLD, FBP1, BHMT, GNMT, ALB, PPIA, MTHFD1, ACAT1, PCK2, GATM, ADH1B, ADH4, Elongation factor 2 (eEF2), Elongation factor 2 kinase, Isoform of 14-3-3 Protein Sigma, Serine/Threonine Kinase 3, Serine/Threonine Kinase 4, Serine/Threonine Kinase 31 and the respective isoforms, the respective homologues with at least 95% identity in amino acid sequence, the respective partial sequences for screening pharmaceutical compounds for HCC.

17. Screening assay for the identification and validation of pharmaceutical compounds comprising one or more of biomarkers for HCC selected from the group comprising proteins defined by SEQ ID No. 1 to 983, preferably proteins PPA1, IGHG1, IGHV4-31, SERPINA1, VIM, LMNA, KRT18, GAPDH, PKM2, HSPA9, HSPA5, TRAP1, ACO2, HSPA8, CCT5, ECH1, SOD1, CA2, QDPR, AGXT, SORD, GLUD1, CPS1, ALDH6A1, GRHPR, UGP2, ALDH2, ECHS1, AKR1C4, ALDH1A1, MPST, ASS1, ACADS, ALDOB, ACAADSB, KHK, SARDH, FTCD, CES1, BDH1, PBLD, FBP1, BHMT, GNMT, ALB, PPIA, MTHFD1, ACAT1, PCK2, GATM, ADH1B, ADH4, Elongation factor 2 (eEF2), Elongation factor 2 kinase, Isoform of 14-3-3 Protein Sigma, Serine/Threonine Kinase 3, Serine/Threonine Kinase 4, Serine/Threonine Kinase 31 and the respective isoforms, the respective homologues with at least 95% identity in amino acid sequence, the respective partial sequences, and wherein the screening assay comprises detection reagents and further aids.
